(19) United States
(12) Patent Application Publication
(10) Pub. No.: US 2024/0150757 A1
(43) Pub. Date: May 9, 2024

(54) ANTISENSE OLIGONUCLEOTIDES TARGETING FOXG1

(71) Applicant: EliGab Tx LLC, Manhasset, NY (US)

(72) Inventors: Scott REICH, Manhasset, NY (US); Hans-Peter VORNLOCHER, Kulmbach (DE); Anke GEICK, Kulmbach (DE); Brian BETTENCOURT, Manhasset, NY (US)

(21) Appl. No.: 18/336,603

(22) Filed: Jun. 16, 2023

Related U.S. Application Data
(63) Continuation of application No. PCT/US21/64082, filed on Dec. 17, 2021.
(60) Provisional application No. 63/127,907, filed on Dec. 18, 2020.

(51) Int. Cl. C12N 15/113; A61K 31/7125

(52) U.S. Cl. CPC C12N 15/113; A61K 31/7125; C12N 2310/11; C12N 2310/315; C12N 2310/321; C12N 2310/3231

(57) ABSTRACT

Provided herein are compositions and methods for treating and/or ameliorating FOXG1 syndrome or the symptoms associated therewith. The compositions and methods disclosed herein utilize antisense oligonucleotides that target FOXG1 in order to modulate FOXG1 by, for example, increasing the amount of FOXG1 (e.g. mRNA encoding a FOXG1 protein or FOXG1 protein) in a cell, thereby restoring FOXG1 function.

### CROSS-REFERENCE

[0001] This application claims the benefit of U.S. Provisional Patent Application No. 63/127,907, filed Dec. 18, 2020, which is incorporated herein by reference in its entirety.

### SEQUENCE LISTING

[0002] This application contains a Sequence Listing, which is incorporated by reference in its entirety. The accompanying Sequence Listing text file, named “2024-01-12 Revised_SL_ST26 062691-501C01US.xml” was created on Jan. 12, 2024 and is 2,123,592 bytes.

### BACKGROUND

[0003] FOXG1 syndrome is a rare neurodevelopmental disorder associated with heterozygous variants in the forkhead box G1 (FOXG1) gene and is characterized by impaired neurological development and/or altered brain physiology. Observed phenotypes of FOXG1 syndrome primarily include a particular pattern of structural alterations in the brain resulting from de novo mutations in the FOXG1 gene. Such structural alterations include a thin or underdeveloped corpus callosum that connects between the right and left hemispheres of the brain, reduced sulci and gyri formation on the surface of the brain, and/or a reduced amount of white matter. FOXG1 syndrome affects most aspects of development in children and the main clinical features observed in association with FOXG1 variants comprise impairment of postnatal growth, primary (congenital) or secondary (postnatal) microcephaly, severe intellectual disability with absent speech development, epilepsy, stereotypies and dyskinesia, abnormal sleep patterns, unexplained episodes of crying, gastroesophageal reflux, and recurrent aspiration.

### SUMMARY

[0004] Provided herein are compositions and methods for treating and/or ameliorating FOXG1 syndrome or the symptoms associated therewith. The compositions and methods disclosed herein utilize antisense oligonucleotides that target FOXG1 in order to modulate FOXG1 by, for example, increasing the amount of functional FOXG1 protein in a cell, thereby restoring or increasing FOXG1 function. The ability to restore or increase functional FOXG1 in cells provides for a foundation for the treatment of FOXG1 syndrome or alleviating symptoms associated therewith.

[0005] Accordingly, provided herein are antisense oligonucleotides, comprising a sequence complementary to a target nucleic acid sequence of a FOXG1 nucleic acid. In some embodiments, antisense oligonucleotide comprises a modification. In some embodiments, the modification comprises a modified inter-nucleoside linker, a modified nucleoside, or a combination thereof. In some embodiments, the antisense oligonucleotide comprises a modified inter-nucleoside linkage. In some embodiments, the modified inter-nucleoside linkage is a phosphorothioate inter-nucleoside linkage. In some embodiments, the antisense oligonucleotide comprises a phosphodiester inter-nucleoside linkage. In some embodiments, the antisense oligonucleotide comprises a modified nucleoside. In some embodiments, the modified nucleoside comprises a modified sugar. In some embodiments, the modified sugar is a bicyclic sugar. In some embodiments, the modified sugar comprises a 2′-O-methoxyethyl group. In some embodiments, the FOXG1 nucleic acid comprises a 5′ untranslated region (5′ UTR) and a 3′ untranslated region (3′ UTR), wherein, the target sequence is located at the 5′ UTR or the 3′ UTR of the FOXG1 nucleic acid.

[0006] In some embodiments, the target sequence is located at the 5′ UTR region of the FOXG1 nucleic acid. In some embodiments, the antisense oligonucleotide comprises a nucleobase sequence selected from the group consisting of SEQ ID NOs.: 1-84. In some embodiments, the target sequence is located at the 3′ UTR region of the FOXG1 nucleic acid. In some embodiments, the antisense oligonucleotide comprises a nucleobase sequence selected from the group consisting of SEQ ID NOs.: 85-384. In certain embodiments, the antisense oligonucleotide targeting the 3′ UTR comprises a nucleobase sequence complementary to a sequence within NM_005249.5_2000-2200_as region or NM_005249.5_2900-3000_as of the FOXG1 nucleic acid. In certain embodiments, the antisense oligonucleotide targeting the 3′ UTR comprises a nucleobase sequence selected from the group consisting SEQ ID NOs: 101, 103, 284, 2886, 287, 288, or 289. In some embodiments, the antisense oligonucleotides are included in an ASO composition comprising more than one ASO. In certain the embodiments, the ASO composition comprises 2, 3, 4, 5 or more ASOs. Such ASO compositions are suitable for use in the methods described herein.

[0007] In some embodiments, the antisense oligonucleotide is a single-stranded modified oligonucleotide. In some embodiments, the FOXG1 nucleic acid molecule is a ribonucleic acid (RNA). In some embodiments, the RNA molecule is a messenger RNA (mRNA) molecule. In some embodiments, the antisense oligonucleotide inhibits regulatory elements (e.g. miRNA suppression, suppression by nucleic acid-binding proteins, etc.) that reduce translation of the FOXG1 RNA. In some embodiments, the antisense oligonucleotide inhibits regulatory elements that reduce stability of the FOXG1 RNA. In some embodiments, the antisense oligonucleotide inhibits regulatory elements located within the 5′ UTR of the FOXG1 RNA. In some embodiments, the antisense oligonucleotide inhibits regulatory elements located within the 3′ UTR of the FOXG1 RNA. In some embodiments, the antisense oligonucleotide inhibits translation of an upstream open reading frame (uORF). In some embodiments, the antisense oligonucleotide sterically inhibits (1) miRNA binding and suppression of FOXG1 translation and/or (2) an RNA binding protein from binding to a regulatory sequence of the FOXG1 RNA and destabilizing the FOXG1 RNA. In some embodiments, the antisense oligonucleotide inhibits nuclease digestion of a 5′ region or 3′ region of the FOXG1 RNA. A pharmaceutical composition comprising the antisense oligonucleotide of an antisense oligonucleotide and a pharmaceutically acceptable carrier or diluent.

[0008] Also provided are methods of modulating expression of FOXG1 in a cell, comprising contacting the cell with a composition comprising an antisense oligonucleotide complementary to a target nucleic acid sequence of a FOXG1 nucleic acid.

[0009] In some embodiments, the cell is a located in a brain of an individual. In some embodiments, the individual is a human. In some embodiments, the individual comprises a mutated FOXG1 gene. In some embodiments, the individual has a FOXG1 disease or disorder. In some embodiments, the FOXG1 disease or disorder is FOXG1 syndrome. In some embodiments, the FOXG1 nucleic acid is a ribonucleic acid (RNA). In some embodiments, the RNA is a messenger RNA (mRNA).

[0010] In some embodiments, the antisense oligonucleotide inhibits regulatory elements that reduce translation or stability of the FOXG1 RNA, thereby increasing an amount of FOXG1 protein in a cell.

[0011] In some embodiments, the antisense oligonucleotide is a single-stranded modified oligonucleotide. In some embodiments, the antisense oligonucleotide comprises at least one modified inter-nucleoside linkage. In some embodiments, the modified inter-nucleoside linkage is a phosphorothioate inter-nucleoside linkage. In some embodiments, the antisense oligonucleotide comprises at least one phosphodiester inter-nucleoside linkage. In some embodiments, the antisense oligonucleotide comprises a modified nucleoside. In some embodiments, the modified nucleoside comprises a modified sugar. In some embodiments, the modified sugar is a bicyclic sugar. In some embodiments, the modified sugar comprises a 2′-O-methoxyethyl (MOE) group. In some embodiments, the antisense oligonucleotide comprises at least one phosphodiester inter-nucleoside linkage. In some embodiments, the target sequence is located at a 5′ UTR region or 3′ UTR region of the FOXG1 nucleic acid.

[0012] In some embodiments, the target sequence is located at the 5′ UTR region of the FOXG1 nucleic acid. In some embodiments, the antisense oligonucleotide comprises a nucleobase sequence selected from the group consisting of SEQ ID NOs.: 1-84. In some embodiments, the target sequence is located at the 3′ UTR region of the FOXG1 nucleic acid. In some embodiments, the antisense oligonucleotide comprises a nucleobase sequence selected from the group consisting of SEQ ID NOs.: 85-384. In some embodiments, modulating expression comprises increasing expression of a FOXG1 protein in the cell. In some embodiments, modulating expression comprises increasing stability or half-life of the FOXG1 nucleic acid in the cell. In some embodiments, modulating expression comprises increasing translation of a FOXG1 protein in the cell. In some embodiments, the antisense oligonucleotide is administered to the individual by intrathecal injection, intracerebroventricular injection, inhalation, parenteral injection or infusion, or orally.

[0013] Further provided are methods of treating or ameliorating a FOXG1 disease or disorder in an individual having, or at risk of having, the FOXG1 disease or disorder, comprising administering to the individual an antisense oligonucleotide, wherein the antisense oligonucleotide comprises a sequence complementary to a target sequence of the FOXG1 nucleic acid, thereby treating or ameliorating a FOXG1 disease in the individual. In some embodiments, the individual is a human. In some embodiments, the human is an unborn human. In some embodiments, the individual comprises a mutated FOXG1 gene. In some embodiments, the FOXG1 disease or disorder is FOXG1 syndrome. In some embodiments, the FOXG1 nucleic acid is a ribonucleic acid (RNA). In some embodiments, the RNA molecule is a messenger RNA (mRNA). In some embodiments, the target sequence is located at a 5′ UTR region or 3′ UTR region of the FOXG1 nucleic acid. In some embodiments, the target sequence is located at the 5′ UTR region of the FOXG1 nucleic acid. In some embodiments, the antisense oligonucleotide comprises a nucleobase sequence selected from the group consisting of SEQ ID NOs.: 1-84. In some embodiments, the target sequence is located at the 3′ UTR region of the FOXG1 nucleic acid. In some embodiments, the antisense oligonucleotide comprises a nucleobase sequence selected from the group consisting of SEQ ID NOs.: 85-384. In some embodiments, the antisense oligonucleotide modulates expression of the FOXG1 nucleic acid in the individual. In some embodiments, modulating expression comprises increasing stability or half-life of the FOXG1 nucleic acid in the individual. In some embodiments, modulating expression comprises increasing translation of a FOXG1 protein in the individual. In some embodiments, modulating expression comprises increasing translation of a FOXG1 protein in the individual. In some embodiments, modulating expression comprises increasing an amount of FOXG1 a cell of the individual. In some embodiments, the cell is located in the brain of the individual.

[0014] Also provided are antisense oligonucleotides comprising an antisense oligonucleotide sequence that hybridizes to a target nucleic acid sequence located within positions 2000-2100 or 2900-3000 of a FOXG1 nucleic acid (e.g., FOXG1 mRNA). In some embodiments, the antisense oligonucleotide comprises a modification. In some embodiments, the modification comprises a modified inter-nucleoside linker, a modified nucleoside, or a combination thereof. In some embodiments, the antisense oligonucleotide comprises a modified inter-nucleoside linkage. In some embodiments, the antisense oligonucleotide sequence comprises SEQ ID NO: 100, SEQ ID NO:103, SEQ ID NO: 284, SEQ ID NO: 286, SEQ ID NO: 287, SEQ ID NO: 288, or SEQ ID NO: 289. In some embodiments, the antisense oligonucleotide hybridizes to one or more nucleotides within or adjacent to a position on the FOXG1 nucleic acid targeted by SEQ ID NO: 100, SEQ ID NO:103, SEQ ID NO: 284, SEQ ID NO: 286, SEQ ID NO: 287, SEQ ID NO: 288, or SEQ ID NO: 289. In some embodiments, the antisense oligonucleotide hybridizes to one or more nucleotides within a position on the FOXG1 nucleic acid targeted by SEQ ID NO: 100, SEQ ID NO:103, SEQ ID NO: 284, SEQ ID NO: 286, SEQ ID NO: 287, SEQ ID NO: 288, or SEQ ID NO: 289. In some embodiments, the antisense oligonucleotide sequence comprises 80% sequence identity or greater to SEQ ID NO: 100, SEQ ID NO: 103, SEQ ID NO: 284, SEQ ID NO: 286, SEQ ID NO: 287, SEQ ID NO: 288, or SEQ ID NO: 289 In some embodiments, the antisense oligonucleotide sequence comprises 90% sequence identity or greater to SEQ ID NO: 100, SEQ ID NO: 103, SEQ ID NO: 284, SEQ ID NO: 286, SEQ ID NO: 287, SEQ ID NO: 288, or SEQ ID NO: 289. In some embodiments, the antisense oligonucleotide sequence comprises 10 or more contiguous nucleotides selected from a sequence within SEQ ID NO: 100, SEQ ID NO: 103, SEQ ID NO: 284, SEQ ID NO: 286, SEQ ID NO: 287, SEQ ID NO: 288, or SEQ ID NO: 289

### INCORPORATION BY REFERENCE

[0015] All publications, patents, and patent applications mentioned in this specification are herein incorporated by reference to the same extent as if each individual publication, patent, or patent application was specifically and individually indicated to be incorporated by reference.

### BRIEF DESCRIPTION OF THE DRAWINGS

[0016] The novel features of the disclosure are set forth with particularity in the appended claims. A better understanding of the features and advantages of the present disclosure will be obtained by reference to the following detailed description that sets forth illustrative embodiments, in which the principles of the disclosure are utilized, and the accompanying drawings of which:

[0017] FIG. 1 shows a diagram of a FOXG1 transcript.

[0018] FIG. 2 shows FOXG1 mRNA expression of cells treated with ASOs targeting FOXG1 relative to mock transfection control

[0019] FIG. 3 shows FOXG1 mRNA expression modulation of 2′-O-methoxyethyl (MOE) chemistry antisense oligos in cells.

[0020] FIGS. 4A and 4B show FOXG1 mRNA expression modulation of selected 2′-O-methoxyethyl (MOE) chemistry antisense oligos in cells.

### DETAILED DESCRIPTION

[0021] Deletions or mutations in a single allele of the forkhead box G1 (FOXG1) gene cause FOXG1 syndrome. FOXG1 syndrome is a rare disease characterized by developmental delay, severe intellectual disability, epilepsy, absent language, and dyskinesis. Hallmarks of altered brain physiologies associated with FOXG1 syndrome include cortical atrophy and agenesis of the corpus callosum. The FOXG1 gene/protein is a member of the forkhead transcription factor family and is expressed specifically in neural progenitor cells of the forebrain. The FOXG1 gene is composed of one coding exon and notably, the location or type of FOXG1 mutation can be associated with or indicative of clinical severity.

[0022] The FOXG1 protein plays an important role in brain development, particularly in a region of the embryonic brain known as the telencephalon. The telencephalon ultimately develops into several critical structures, including the largest part of the brain (i.e. cerebrum), which controls most voluntary activity, language, sensory perception, learning, and memory. A shortage of functional FOXG1 protein, as observed in individuals having mutations or deletions in a single FOXG1 allele (i.e. heterozygous individuals), disrupts normal brain patterning and development.

[0023] Accordingly, disclosed herein are compositions and methods useful for increasing an amount of functional FOXG1 (e.g. FOXG1 protein or FOXG1 messenger ribonucleic acid (mRNA)) in a cell having a shortage of functional FOXG1. Such compositions and methods are useful in their application for treating individual having a FOXG1-related disease or disorder wherein the lack or shortage of functional FOXG1 protein can be remedied. In order to achieve an increase of FOXG1 expression in cells or in an individual, antisense oligonucleotides targeting FOXG1 are used.

### Antisense Oligonucleotides

[0024] Antisense oligonucleotides (ASOs) are small (˜18-30 nucleotides), synthetic, single-stranded nucleic acid polymers that can be employed to modulate gene expression by various mechanisms. Antisense oligonucleotides (ASOs) can be subdivided into two major categories: RNase H competent and steric block. For RNase H competent antisense oligonucleotides, the endogenous RNase H enzyme recognizes RNA-DNA heteroduplex substrates that are formed when antisense oligonucleotides bind to their cognate mRNA transcripts to catalyze the degradation of RNA. Steric block oligonucleotides are antisense oligonucleotides (ASOs) that are designed to bind to target transcripts with high affinity but do not induce target transcript degradation.

[0025] Steric block antisense oligonucleotides (ASOs) can be designed to inhibit translation inhibition, interfere with upstream open reading frames that negatively regulate translation in order to activate protein expression, inhibit RNA degradation, inhibit miRNA suppression, and influence polyadenylation signals to increase transcript stability. Accordingly, provided herein are steric block antisense oligonucleotides (ASOs) useful for modulating the expression and/or amount of functional FOXG1 (i.e. functional FOXG1) in a cell (e.g. mRNA encoding a functional FOXG1 protein or a FOXG1 protein). Specifically, the antisense oligonucleotides (ASOs) are useful for increasing the expression and/or amount of FOXG1 (i.e. functional FOXG1) in a cell (e.g. mRNA encoding a functional FOXG1 protein or a functional FOXG1 protein). The antisense oligonucleotides (ASOs) disclosed herein achieve this effect by targeting a FOXG1 nucleic acid encoding a functional FOXG1 protein and inhibiting translation inhibition, interfering with upstream open reading frames (uORFs), inhibiting RNA degradation, inhibiting miRNA suppression of expression, and/or increasing RNA stability to ultimately increase the number of RNA transcripts encoding FOXG1 and/or protein expression of a FOXG1 (i.e. functional FOXG1) protein.

[0026] In order to achieve effective targeting of a FOXG1 RNA (e.g. messenger RNA), the antisense oligonucleotides disclosed herein (ASOs) comprise a sequence complementary to a sequence of the FOXG1 RNA, wherein the complementary sequence binds and/or hybridizes to a sequence of the FOXG1 RNA. Accordingly, disclosed herein are antisense oligonucleotides (ASOs) comprising a sequence complementary to a target nucleic acid sequence of a FOXG1 nucleic acid (e.g. a FOXG1 mRNA). Generally, mRNA transcripts comprise a 5′ untranslated region (5′ UTR) and a 3′ untranslated region (3′ UTR). The antisense oligonucleotides (ASOs) disclosed herein target the 5′ UTR or the 3′ UTR of a FOXG1 mRNA transcript. In order to achieve targeting of the 5′ UTR or 3′ UTR, the antisense oligonucleotide (ASOs) comprise a sequence complementary to a target sequence is located at the 5′ UTR or the 3′ UTR of the FOXG1 mRNA. In some embodiments, the target sequence is located at or within the 5′ UTR. In certain embodiments, the antisense oligonucleotide targeting the 5′ UTR comprises a nucleobase sequence selected from the group consisting of SEQ ID NO.: 1-84. In some embodiments, the target sequence is located at or within the 3′ UTR. In certain embodiments, the antisense oligonucleotide targeting the 3′ UTR comprises a nucleobase sequence selected from the group consisting of SEQ ID NO.: 85-384. In certain embodiments, the antisense oligonucleotide targeting the 3′ UTR comprises a nucleobase sequence complementary to a sequence within NM_005249.5_2000-2200_as region or NM_005249.5_2900-3000_as of the FOXG1 nucleic acid. In certain embodiments, the antisense oligonucleotide targeting the 3′ UTR comprises a nucleobase sequence selected from the group consisting SEQ ID NOs: 101, 103, 284, 2886, 287, 288, or 289. In some embodiments, the antisense oligonucleotides are included in an ASO composition comprising more than one ASO. In certain the embodiments, the ASO composition comprises 2, 3, 4, 5 or more ASOs. Such ASO compositions are suitable for use in the methods described herein. FIG. 1 shows a diagram of the FOXG1 mRNA transcript comprising 5′ and 3′ UTRs. TABLE 1 discloses sequences and antisense oligonucleotides (ASOs) having sequences complementary to the 5′ UTR of a FOXG1 mRNA. TABLE 2 discloses sequences and antisense oligonucleotides (ASOs) having sequences complementary to the 3′ UTR of a FOXG1 mRNA. In some embodiments, the antisense oligonucleotides (ASOs) disclosed herein, targeting the 5′ UTR or 3′ UTR, increase an amount of FOXG1 protein and/or mRNA transcripts in a cell and/or individual. In certain embodiments, targeting a FOXG1 nucleic acid encoding a functional FOXG1 protein inhibits translation inhibition, interferes with upstream open reading frames (uORFs), inhibits RNA degradation, and/or increases RNA stability to ultimately increase protein expression of a functional FOXG1 protein.

[0027] In order to improve the pharmacodynamic, pharmacokinetic, and biodistribution properties of antisense oligonucleotides (ASOs), the antisense oligonucleotides can be designed and engineered to comprise one or more chemical modifications (e.g. a modified inter-nucleoside linker, a modified nucleoside, or a combination thereof). Accordingly, in some embodiments, the antisense oligonucleotide is a modified oligonucleotide. In some embodiments, the antisense oligonucleotide comprises one or more modifications. In certain embodiments, the modification comprises a modified inter-nucleoside linker, a modified nucleoside, or a combination thereof

### Modified Inter-Nucleoside Linkers

[0028] Modification of the inter-nucleoside linker (i.e. backbone) can be utilized to increase pharmacodynamic, pharmacokinetic, and biodistribution properties. For example, inter-nucleoside linker modifications prevent or reduce degradation by cellular nucleases, thus increasing the pharmacokinetics and bioavailability of the antisense oligonucleotide. Generally, a modified inter-nucleoside linker includes any linker other than other than phosphodiester (PO) liners, that covalently couples two nucleosides together. In some embodiments, the modified inter-nucleoside linker increases the nuclease resistance of the antisense oligonucleotide compared to a phosphodiester linker. For naturally occurring antisense oligonucleotides, the inter-nucleoside linker includes phosphate groups creating a phosphodiester bond between adjacent nucleosides. Modified inter-nucleoside linkers are particularly useful in stabilizing antisense oligonucleotides for in vivo use and may serve to protect against nuclease cleavage.

[0029] In some embodiments, the antisense oligonucleotide comprises one or more inter-nucleoside linkers modified from the natural phosphodiester to a linker that is for example more resistant to nuclease attack. In some embodiments all of the inter-nucleoside linkers of the antisense oligonucleotide, or contiguous nucleotide sequence thereof, are modified. In some embodiments all of the inter-nucleoside linkers of the antisense oligonucleotide, or contiguous nucleotide sequence thereof, are nuclease resistant inter-nucleoside linkers. In some embodiments the inter-nucleoside linkage comprises sulphur (S), such as a phosphorothioate inter-nucleoside linkage.

[0030] Phosphorothioate inter-nucleoside linkers are particularly useful due to nuclease resistance and improved pharmacokinetics. In some embodiments, one or more of the inter-nucleoside linkers of the antisense oligonucleotide, or contiguous nucleotide sequence thereof, comprise a phosphorothioate inter-nucleoside linker. In some embodiments, all of the inter-nucleoside linkers of the antisense oligonucleotide, or contiguous nucleotide sequence thereof, comprise a phosphorothioate inter-nucleoside linker.

### Modified Nucleosides

[0031] Modifications to the ribose sugar or nucleobase can also be utilized to increase pharmacodynamic, pharmacokinetic, and biodistribution properties. Similar to modifications of the inter-nucleoside linker, nucleoside modifications prevent or reduce degradation by cellular nucleases, thus increasing the pharmacokinetics and bioavailability of the antisense oligonucleotide. Generally, a modified nucleoside includes the introduction of one or more modifications of the sugar moiety or the nucleobase moiety.

[0032] The antisense oligonucleotides, as described, can comprise one or more nucleosides comprising a modified sugar moiety, wherein the modified sugar moiety is a modification of the sugar moiety when compared to the ribose sugar moiety found in deoxyribose nucleic acid (DNA) and RNA. Numerous nucleosides with modification of the ribose sugar moiety can be utilized, primarily with the aim of improving certain properties of oligonucleotides, such as affinity and/or nuclease resistance. Such modifications include those where the ribose ring structure is modified. These modifications include replacement with a hexose ring (HNA), a bicyclic ring having a biradicle bridge between the C2 and C4 carbons on the ribose ring (e.g. locked nucleic acids (LNA)), or an unlinked ribose ring which typically lacks a bond between the C2 and C3 carbons (e.g. UNA). Other sugar modified nucleosides include, for example, bicyclohexose nucleic acids or tricyclic nucleic acids. Modified nucleosides also include nucleosides where the sugar moiety is replaced with a non-sugar moiety, for example in the case of peptide nucleic acids (PNA), or morpholino nucleic acids.

[0033] Sugar modifications also include modifications made by altering the substituent groups on the ribose ring to groups other than hydrogen, or the 2′-OH group naturally found in DNA and RNA nucleosides. Substituents may, for example be introduced at the 2′, 3′, 4′ or 5′ positions. Nucleosides with modified sugar moieties also include 2′ modified nucleosides, such as 2′ substituted nucleosides. Indeed, much focus has been spent on developing 2′ substituted nucleosides, and numerous 2′ substituted nucleosides have been found to have beneficial properties when incorporated into oligonucleotides, such as enhanced nucleoside resistance and enhanced affinity. A 2′ sugar modified nucleoside is a nucleoside that has a substituent other than H or —OH at the 2′ position (2′ substituted nucleoside) or comprises a 2′ linked biradicle, and includes 2′ substituted nucleosides and LNA (2′-4′ biradicle bridged) nucleosides. Examples of 2′ substituted modified nucleosides are 2′-O-alkyl-RNA, 2′-O-methyl-RNA, 2′-alkoxy-RNA, 2′-O-methoxyethyl-oligos (MOE), 2′-amino-DNA, 2′-Fluoro-RNA, and 2′-F-ANA nucleoside. In some embodiments, the antisense oligonucleotide comprises one or more modified sugars. In some embodiments, the antisense oligonucleotide comprises only modified sugars. In certain embodiments, the antisense oligo comprises greater than 10%, 25%, 50%, 75%, or 90% modified sugars. In some embodiments, the modified sugar is a bicyclic sugar. In some embodiments, the modified sugar comprises a 2′-O-methoxyethyl (MOE) group.

[0034] In some embodiments, the antisense oligonucleotide comprises both inter-nucleoside linker modifications and nucleoside modifications.

### Pharmaceutical Compositions

[0035] Further provided herein are pharmaceutical compositions comprising any of the disclosed antisense oligonucleotides and a pharmaceutically acceptable diluent, carrier, salt and/or adjuvant. A pharmaceutically acceptable diluent includes phosphate-buffered saline (PBS) and pharmaceutically acceptable salts include, but are not limited to, sodium and potassium salts. In some embodiments the pharmaceutically acceptable diluent is sterile phosphate buffered saline. In some embodiments the oligonucleotide is used in the pharmaceutically acceptable diluent at a concentration of 50-300 μM solution. In some embodiments, the oligonucleotide, as described, is administered at a dose of 10-1000 μg.

[0036] The antisense oligonucleotides or oligonucleotide conjugates of the disclosure may be mixed with pharmaceutically acceptable active or inert substances for the preparation of pharmaceutical compositions or formulations. Compositions and methods for the formulation of pharmaceutical compositions are dependent upon a number of criteria, including, but not limited to, route of administration, extent of disease, or dose to be administered.

### Methods of Use

[0037] The antisense oligonucleotides (ASOs) provided herein are useful for targeting a FOXG1 nucleic acid encoding a functional FOXG1 protein, wherein an antisense oligonucleotide inhibits translation inhibition, interferes with upstream open reading frames (uORFs), inhibits RNA degradation, and/or increases RNA stability to ultimately increase protein expression of a functional FOXG1 protein. According, the antisense oligonucleotides targeting are further useful in methods for increasing the expression and/or amount of functional FOXG1 in a cell (e.g. an amount of functional FOXG1 mRNA or protein). Accordingly, provided herein are methods of modulating expression of a FOXG1 in a cell, comprising contacting the cell with a composition comprising an antisense oligonucleotide complementary to a target nucleic acid sequence of a FOXG1 nucleic acid.

[0038] Further provided, are methods of treating or ameliorating a FOXG1 disease or disorder in an individual having, or at risk of having, the FOXG1 disease or disorder, comprising administering to the individual an antisense oligonucleotide, wherein the antisense oligonucleotide comprises a sequence complementary to a target sequence of the FOXG1 nucleic acid, thereby treating or ameliorating a FOXG1 disease in the individual.

[0039] Generally, cells of interest include neuronal cells and/or cells associated with the brain or brain development. In some embodiments, the cell is located in a brain of an individual. In some embodiments, the cell is a neural cell. In some embodiments, the individual is a human. In certain embodiments, the human is an unborn human.

[0040] The antisense oligonucleotides (ASOs) and methods are particularly useful for increasing the expression and/or amount of functional FOXG1 (e.g. an amount of functional FOXG1 mRNA or protein) in a cell and/or individual comprising a mutated or deleted FOXG1 allele. In some embodiments, the cell and/or individual comprises a mutated FOXG1 gene. In some embodiments the individual has been diagnosed with or at risk of a FOCG1 disease or disorder. In some embodiments the FOXG1 disease o disorder is FOXG1 syndrome.

[0041] In some embodiments, modulating expression comprises increasing expression of a FOXG1 protein in the cell. In some embodiments, modulating expression comprises increasing stability or half-life of the FOXG1 nucleic acid in the cell. In some embodiments, modulating expression comprises increasing translation of a FOXG1 protein in the cell.

[0042] In order to achieve effective targeting of a FOXG1 RNA (e.g. messenger RNA), the antisense oligonucleotides disclosed herein (ASOs) comprise a sequence complementary to a sequence of the FOXG1 RNA, wherein the complementary sequence binds and/or hybridizes to a sequence of the FOXG1 RNA. For example, mRNA transcripts comprise a 5′ untranslated region (5′ UTR) and a 3′ untranslated region (3′ UTR). The antisense oligonucleotides (ASOs) disclosed herein target the 5′ UTR or the 3′ UTR of a FOXG1 mRNA transcript. In order to achieve targeting of the 5′ UTR or 3′ UTR, the antisense oligonucleotide (ASOs) comprise a sequence complementary to a target sequence is located at the 5′ UTR or the 3′ UTR of the FOXG1 mRNA. In some embodiments, the target sequence is located at or within the 5′ UTR. In certain embodiments, the antisense oligonucleotide targeting the 5′ UTR comprises a nucleobase sequence selected from the group consisting of SEQ ID NO.: 1-84. In some embodiments, the target sequence is located at or within the 3′ UTR. In certain embodiments, the antisense oligonucleotide targeting the 3′ UTR comprises a nucleobase sequence selected from the group consisting of SEQ ID NO.: 85-384. In certain embodiments, the antisense oligonucleotide targeting the 3′ UTR comprises a nucleobase sequence complementary to a sequence within NM_005249.5_2000-2200_as region or NM_005249.5_2900-3000_as of the FOXG1 nucleic acid. In certain embodiments, the antisense oligonucleotide targeting the 3′ UTR comprises a nucleobase sequence complementary to a sequence within NM_005249.5_2000-2100_as region of the FOXG1 nucleic acid. In certain embodiments, the antisense oligonucleotide targeting the 3′ UTR comprises a nucleobase sequence selected from the group consisting SEQ ID NOs: 100, 103, 284, 2886, 287, 288, or 289. In some embodiments, the antisense oligonucleotides are included in an ASO composition comprising more than one ASO. In certain the embodiments, the ASO composition comprises 2, 3, 4, 5 or more ASOs.

[0043] Formulations of therapeutic and diagnostic agents can be prepared by mixing with physiologically acceptable carriers, excipients, or stabilizers in the form of, e.g., lyophilized powders, slurries, aqueous solutions, lotions, or suspensions (see, e.g., Hardman et al., Goodman and Gilman's The Pharmacological Basis of Therapeutics, McGraw-Hill, New York, N.Y., 2001; Gennaro, Remington: The Science and Practice of Pharmacy, Lippincott, Williams, and Wilkins, New York, N.Y., 2000; Avis, et al. (eds.), Pharmaceutical Dosage Forms: Parenteral Medications, Marcel Dekker, N Y, 1993; Lieberman, et al. (eds.), Pharmaceutical Dosage Forms: Tablets, Marcel Dekker, N Y, 1990; Lieberman, et al. (eds.) Pharmaceutical Dosage Forms: Disperse Systems, Inc., New York, N.Y., 2000).

[0044] Compositions comprising antisense oligonucleotides (ASOs), as disclosed herein, can be provided by doses at intervals of, e.g., one day, one week, or 1-7 times per week. A specific dose protocol is one involving the maximal dose or dose frequency that avoids significant undesirable side effects.

[0045] The disclosed antisense oligonucleotides or pharmaceutical compositions thereof can be administered topically (such as, to the skin, inhalation, ophthalmic or otic) or enterally (such as, orally or through the gastrointestinal tract) or parenterally (such as, intravenous, subcutaneous, intra-muscular, intracerebral, intracerebroventricular or intrathecal). In some embodiments the antisense oligonucleotide or pharmaceutical compositions thereof are administered by a parenteral route including intravenous, intraarterial, subcutaneous, intraperitoneal or intramuscular injection or infusion, intrathecal or intracranial, e.g. intracerebral or intraventricular, administration. In some embodiments the active oligonucleotide or oligonucleotide conjugate is administered intravenously.

### Definitions

[0046] Unless defined otherwise, all terms of art, notations and other technical and scientific terms or terminology used herein are intended to have the same meaning as is commonly understood by one of ordinary skill in the art to which the claimed subject matter pertains. In some cases, terms with commonly understood meanings are defined herein for clarity and/or for ready reference, and the inclusion of such definitions herein should not necessarily be construed to represent a substantial difference over what is generally understood in the art.

[0047] The term “FOXG1,” as used herein, generally refers to the gene and gene products that encode a member of the fork-head transcription factor family. The encoded protein, which functions as a transcriptional repressor, is highly expressed in neural tissues during brain development. Mutations at this locus have been associated with Rett syndrome and a diverse spectrum of neurodevelopmental disorders defined as part of FOXG1 syndrome. Depending on the context of its use, “FOXG1” can refer to the FOXG1 gene, a FOXG1 deoxyribonucleic acid molecule (DNA), a FOXG1 ribonucleic acid molecule (RNA), or a FOXG1 protein. The mRNA sequence of FOXG1 is described in “NM_005249.5→NP_005240.3 forkhead box protein G1” or “accession number NM_005249.5” or the mRNA encoded by “NCBI GENE ID: 2290”. A functional FOXG1 protein describes the wild-type or unmutated FOXG1 gene, mRNA, and/or protein. Generally, “FOXG1” refers to a functional ‘FOXG1” gene or gene product, having normal function/activity within a cell. Deletions or mutations or variants of FOXG1 are indicative of non-functional FOXG1 variants having reduced, inhibited, or ablated FOXG1 function. As disclosed herein, the compositions and methods disclosed herein are primarily concerned with modulating or increasing or restoring an amount of FOXG1 (i.e. functional FOXG1) in a cell and/or individual.

[0048] The term “oligonucleotide,” as used herein, generally refers to a molecule comprising two or more covalently linked nucleosides. Such covalently bound nucleosides may also be referred to as nucleic acid molecules or oligomers. Oligonucleotides are commonly made in the laboratory by solid-phase chemical synthesis followed by purification. When referring to a sequence of the oligonucleotide, reference is made to the sequence or order of nucleobase moieties, or modifications thereof, of the covalently linked nucleotides or nucleosides. The oligonucleotide of the disclosure is man-made, and is chemically synthesized, and is typically purified or isolated. The oligonucleotide disclosed may comprise one or more modified nucleosides or nucleotides.

[0049] The term “antisense oligonucleotide,” as used herein, refers to oligonucleotides capable of modulating expression of a target gene by hybridizing to a target nucleic acid, in particular to a contiguous sequence on a target nucleic acid. Preferably, the antisense oligonucleotides of the present disclosure are single stranded. In some embodiments, the antisense oligonucleotide is single stranded.

[0050] The term “modified oligonucleotide” refers to an oligonucleotide comprising one or more sugar-modified nucleosides, modified nucleobases, and/or modified inter-nucleoside linkers.

[0051] The term “modified nucleoside” or “nucleoside modification,” as used herein, refers to nucleosides modified as compared to the equivalent DNA or RNA nucleoside by the introduction of one or more modifications of the sugar moiety or the (nucleo)base moiety. In some embodiments, the modified nucleoside comprise a modified sugar moiety. The term modified nucleoside may also be used herein interchangeably with the term “nucleoside analogue” or modified “units” or modified “monomers”.

[0052] The term “modified inter-nucleoside linkage” is refers to linkers other than phosphodiester (PO) linkers, that covalently couples two nucleosides together. Nucleotides with modified inter-nucleoside linkage are also termed “modified nucleotides”. In some embodiments, the modified inter-nucleoside linkage increases the nuclease resistance of the oligonucleotide compared to a phosphodiester linkage. For naturally occurring oligonucleotides, the inter-nucleoside linkage includes phosphate groups creating a phosphodiester bond between adjacent nucleosides. Modified inter-nucleoside linkers are particularly useful in stabilizing oligonucleotides for in vivo use and may serve to protect against nuclease cleavage at regions of DNA or RNA nucleosides.

[0053] The term “nucleobase” includes the purine (e.g. adenine and guanine) and pyrimidine (e.g. uracil, thymine and cytosine) moiety present in nucleosides and nucleotides which form hydrogen bonds in nucleic acid hybridization. The term nucleobase also encompasses modified nucleobases which may differ from naturally occurring nucleobases but are functional during nucleic acid hybridization. In this context “nucleobase” refers to both naturally occurring nucleobases such as adenine, guanine, cytosine, thymidine, uracil, xanthine and hypoxanthine, as well as non-naturally occurring variants.

[0054] A nucleobase moiety can be modified by changing the purine or pyrimidine into a modified purine or pyrimidine, such as substituted purine or substituted pyrimidine, such as a nucleobased selected from isocytosine, pseudoisocytosine, 5-methyl cytosine, 5-thiozolo-cytosine, 5-propynyl-cytosine, 5-propynyl-uracil, 5-bromouracil 5-thiazolo-uracil, 2-thio-uracil, 2′thio-thymine, inosine, diaminopurine, 6-aminopurine, 2-aminopurine, 2,6-diaminopurine and 2-chloro-6-aminopurine.

[0055] The nucleobase moieties may be indicated by the letter code for each corresponding nucleobase, e.g. A, T, G, C or U, wherein each letter may optionally include modified nucleobases of equivalent function. For example, in the exemplified oligonucleotides, the nucleobase moieties are selected from A, T, G, C, and 5-methyl cytosine. In some embodiments, the cytosine nucleobases in a 5′cg3′ motif is 5-methyl cytosine.

[0056] The term “hybridizing” or “hybridizes” or “targets” or “binds” describes two nucleic acid strands (e.g. an oligonucleotide and a target nucleic acid) forming hydrogen bonds between base pairs on opposite strands thereby forming a duplex. The affinity of the binding between two nucleic acid strands is the strength of the hybridization. It is often described in terms of the melting temperature (Tm) defined as the temperature at which half of the oligonucleotides are duplexed with the target nucleic acid.

[0057] The oligonucleotide comprises a contiguous nucleotide region which is complementary to or hybridizes to a sub-sequence or region of the target nucleic acid molecule. The term “target sequence” as used herein refers to a sequence of nucleotides present in the target nucleic acid which comprises the nucleobase sequence which is complementary to the contiguous nucleotide region or sequence of the oligonucleotide of the disclosure. In some embodiments, the target sequence consists of a region on the target nucleic acid which is complementary to the contiguous nucleotide region or sequence of the oligonucleotide of the present disclosure. In some embodiments the target sequence is longer than the complementary sequence of a single oligonucleotide, and may, for example represent a preferred region of the target nucleic acid which may be targeted by several oligonucleotides of the present disclosure.

[0058] The oligonucleotide of the present disclosure comprises a contiguous nucleotide region which is complementary to a FOXG1 target nucleic acid, such as a target sequence of FOXG1.

[0059] The oligonucleotide comprises a contiguous nucleotide region of at least 10 nucleotides which is complementary to or hybridizes to a target sequence present in the target nucleic acid molecule. The contiguous nucleotide region (and therefore the target sequence) comprises of at least 10 contiguous nucleotides, such as 11, 12, 13, 14, 15, 16, 17, 18, 19, 20, 21, 22, 23, 24, 25, 30 contiguous nucleotides, such as from 15-30, such as from 18-23 contiguous nucleotides.

[0060] As used herein, the terms “treatment” or “treating” are used in reference to a pharmaceutical or other intervention regimen for obtaining beneficial or desired results in the recipient. Beneficial or desired results include but are not limited to a therapeutic benefit and/or a prophylactic benefit. A therapeutic benefit may refer to eradication or amelioration of symptoms or of an underlying disorder being treated. Also, a therapeutic benefit can be achieved with the eradication or amelioration of one or more of the physiological symptoms associated with the underlying disorder such that an improvement is observed in the subject, notwithstanding that the subject may still be afflicted with the underlying disorder. A prophylactic effect includes delaying, preventing, or eliminating the appearance of a disease or condition, delaying or eliminating the onset of symptoms of a disease or condition, slowing, halting, or reversing the progression of a disease or condition, or any combination thereof. For prophylactic benefit, a subject at risk of developing a particular disease, or to a subject reporting one or more of the physiological symptoms of a disease may undergo treatment, even though a diagnosis of this disease may not have been made.

[0061] The term “a therapeutically effective amount” of a compound of the present application refers to an amount of the compound of the present application that will elicit the biological or medical response of a subject, for example, reduction or inhibition of tumor cell proliferation, or ameliorate symptoms, alleviate conditions, slow or delay disease progression, or prevent a disease, etc. In one non-limiting embodiment, the term “a therapeutically effective amount” refers to the amount of a compound of the present application that, when administered to a subject, is effective to at least partially alleviate, inhibit, prevent and/or ameliorate a condition, or a disorder or a disease, or at least partially inhibit activity of a targeted enzyme or receptor.

[0062] As used in the specification and claims, the singular forms “a”, “an” and “the” include plural references unless the context clearly dictates otherwise. For example, the term “a sample” includes a plurality of samples, including mixtures thereof.

[0063] As used herein, the terms “treatment” or “treating” are used in reference to a pharmaceutical or other intervention regimen for obtaining beneficial or desired results in the recipient. Beneficial or desired results include but are not limited to a therapeutic benefit and/or a prophylactic benefit. A therapeutic benefit may refer to eradication or amelioration of symptoms or of an underlying disorder being treated. Also, a therapeutic benefit can be achieved with the eradication or amelioration of one or more of the physiological symptoms associated with the underlying disorder such that an improvement is observed in the subject, notwithstanding that the subject may still be afflicted with the underlying disorder. A prophylactic effect includes delaying, preventing, or eliminating the appearance of a disease or condition, delaying or eliminating the onset of symptoms of a disease or condition, slowing, halting, or reversing the progression of a disease or condition, or any combination thereof. For prophylactic benefit, a subject at risk of developing a particular disease, or to a subject reporting one or more of the physiological symptoms of a disease may undergo treatment, even though a diagnosis of this disease may not have been made.

[0064] The term “a therapeutically effective amount” of a compound of the present application refers to an amount of the compound of the present application that will elicit the biological or medical response of a subject, for example, reduction or inhibition of tumor cell proliferation, or ameliorate symptoms, alleviate conditions, slow or delay disease progression, or prevent a disease, etc. In one non-limiting embodiment, the term “a therapeutically effective amount” refers to the amount of a compound of the present application that, when administered to a subject, is effective to at least partially alleviate, inhibit, prevent and/or ameliorate a condition, or a disorder or a disease, or at least partially inhibit activity of a targeted enzyme or receptor.

[0065] The terms “determining,” “measuring,” “evaluating,” “assessing,” “assaying,” and “analyzing” are often used interchangeably herein to refer to forms of measurement. The terms include determining if an element is present or not (for example, detection). These terms can include quantitative, qualitative or quantitative and qualitative determinations. Assessing can be relative or absolute. “Detecting the presence of” can include determining the amount of something present in addition to determining whether it is present or absent depending on the context.

[0066] The terms “subject,” “individual,” or “patient” are often used interchangeably herein. A “subject” can be a biological entity containing expressed genetic materials. The biological entity can be a plant, animal, or microorganism, including, for example, bacteria, viruses, fungi, and protozoa. The subject can be tissues, cells and their progeny of a biological entity obtained in vivo or cultured in vitro. The subject can be a mammal. The mammal can be a human. The subject may be diagnosed or suspected of being at high risk for a disease. In some cases, the subject is not necessarily diagnosed or suspected of being at high risk for the disease.

[0067] The term “in vivo” is used to describe an event that takes place in a subject's body.

[0068] The term “ex vivo” is used to describe an event that takes place outside of a subject's body. An ex vivo assay is not performed on a subject. Rather, it is performed upon a sample separate from a subject. An example of an ex vivo assay performed on a sample is an “in vitro” assay.

[0069] The term “in vitro” is used to describe an event that takes places contained in a container for holding laboratory reagent such that it is separated from the biological source from which the material is obtained. In vitro assays can encompass cell-based assays in which living or dead cells are employed. In vitro assays can also encompass a cell-free assay in which no intact cells are employed.

[0070] As used herein, the term “about” a number refers to that number plus or minus 10% of that number. The term “about” a range refers to that range minus 10% of its lowest value and plus 10% of its greatest value.

[0071] As used herein, the terms “treatment” or “treating” are used in reference to a pharmaceutical or other intervention regimen for obtaining beneficial or desired results in the recipient. Beneficial or desired results include but are not limited to a therapeutic benefit and/or a prophylactic benefit. A therapeutic benefit may refer to eradication or amelioration of symptoms or of an underlying disorder being treated. Also, a therapeutic benefit can be achieved with the eradication or amelioration of one or more of the physiological symptoms associated with the underlying disorder such that an improvement is observed in the subject, notwithstanding that the subject may still be afflicted with the underlying disorder. A prophylactic effect includes delaying, preventing, or eliminating the appearance of a disease or condition, delaying or eliminating the onset of symptoms of a disease or condition, slowing, halting, or reversing the progression of a disease or condition, or any combination thereof. For prophylactic benefit, a subject at risk of developing a particular disease, or to a subject reporting one or more of the physiological symptoms of a disease may undergo treatment, even though a diagnosis of this disease may not have been made.

[0072] The section headings used herein are for organizational purposes only and are not to be construed as limiting the subject matter described.

### EXEMPLARY EMBODIMENTS

[0073] Among the exemplary embodiments are:

[0074] Embodiment 1: An antisense oligonucleotide, comprising a sequence complementary to a target nucleic acid sequence of a FOXG1 nucleic acid.

[0075] Embodiment 2: The antisense oligonucleotide of embodiment 1, wherein antisense oligonucleotide comprises a modification.

[0076] Embodiment 3: The antisense oligonucleotide of embodiment 2, wherein the modification comprises a modified inter-nucleoside linker, a modified nucleoside, or a combination thereof.

[0077] Embodiment 4: The antisense oligonucleotide of embodiment 3, wherein the antisense oligonucleotide comprises a modified inter-nucleoside linkage.

[0078] Embodiment 5: The antisense oligonucleotide of embodiment 4, wherein the modified inter-nucleoside linkage is a phosphorothioate inter-nucleoside linkage.

[0079] Embodiment 6: The antisense oligonucleotide of any one of embodiments 3 to 5, wherein the antisense oligonucleotide comprises a phosphodiester inter-nucleoside linkage.

[0080] Embodiment 7: The antisense oligonucleotide of any one of embodiments 3 to 6, wherein the antisense oligonucleotide comprises a modified nucleoside.

[0081] Embodiment 8: The antisense oligonucleotide of embodiment 7, wherein the modified nucleoside comprises a modified sugar.

[0082] Embodiment 9: The antisense oligonucleotide of embodiment 8, wherein the modified sugar is a bicyclic sugar.

[0083] Embodiment 10: The antisense oligonucleotide of embodiment 8, wherein the modified sugar comprises a 2′-O-methoxyethyl (MOE) group.

[0084] Embodiment 11: The antisense oligonucleotide of any one of embodiments 1 to 10, wherein the FOXG1 nucleic acid comprises a 5′ untranslated region (5′ UTR) and a 3′ untranslated region (3′ UTR), and wherein the target sequence is located at the 5′ UTR or the 3′ UTR of the FOXG1 nucleic acid.

[0085] Embodiment 12: The antisense oligonucleotide of embodiment 11, wherein the target sequence is located at the 3′ UTR region of the FOXG1 nucleic acid.

[0086] Embodiment 13: The antisense oligonucleotide of embodiment 12, wherein the target sequence is located within a NM_005249.5_2000-2200_as region of the FOXG1 nucleic acid.

[0087] Embodiment 14: The antisense oligonucleotide of embodiment 13, wherein the antisense oligonucleotide comprises SEQ ID NO: 100 or SEQ ID NO:103.

[0088] Embodiment 15: The antisense oligonucleotide of embodiment 12, wherein the target sequence is located within a NM_005249.5_2900-3000_as region of the FOXG1 nucleic acid.

[0089] Embodiment 16: The antisense oligonucleotide of embodiment 13, wherein the antisense oligonucleotide comprises SEQ ID NO: 284, SEQ ID NO: 286, SEQ ID NO: 287, SEQ ID NO: 288, or SEQ ID NO: 289.

[0090] Embodiment 17: The antisense oligonucleotide of any one of embodiments 1 to 16, wherein the antisense oligonucleotide is a single-stranded modified oligonucleotide

[0091] Embodiment 18: The antisense oligonucleotide of any one of embodiments 1 to 17, wherein the FOXG1 nucleic acid molecule is a ribonucleic acid (RNA).

[0092] Embodiment 19: The antisense oligonucleotide of embodiment 18, wherein the RNA molecule is a messenger RNA (mRNA) molecule.

[0093] Embodiment 20: The antisense oligonucleotide of any one of embodiments 18 to 19, wherein the antisense oligonucleotide inhibits regulatory elements (e.g. miRNA suppression, suppression by nucleic acid-binding proteins, etc.) that reduce translation of the FOXG1 RNA.

[0094] Embodiment 21: The antisense oligonucleotide of any one of embodiments 18 to 19, wherein the antisense oligonucleotide inhibits regulatory elements that reduce stability of the FOXG1 RNA.

[0095] Embodiment 22: The antisense oligonucleotide of embodiment 21, wherein the antisense oligonucleotide inhibits regulatory elements (e.g. miRNA suppression, suppression by nucleic acid-binding proteins, etc.) located within the 3′ UTR of the FOXG1 RNA.

[0096] Embodiment 23: The antisense oligonucleotide of embodiment 21, wherein the antisense oligonucleotide sterically inhibits (1) miRNA binding and suppression of FOXG1 translation and/or (2) an RNA binding protein from binding to a regulatory sequence of the FOXG1 RNA and destabilizing the FOXG1 RNA.

[0097] Embodiment 24: The antisense oligonucleotide of embodiment 21, wherein the antisense oligonucleotide inhibits nuclease digestion of the FOXG1 RNA.

[0098] Embodiment 25: A pharmaceutical composition comprising the antisense oligonucleotide of any one of embodiments 1 to 24 and a pharmaceutically acceptable carrier or diluent.

[0099] Embodiment 26: A method of modulating expression of a FOXG1 in a cell, comprising contacting the cell with a composition comprising an antisense oligonucleotide complementary to a target nucleic acid sequence of a FOXG1 nucleic acid.

[0100] Embodiment 27: The method of embodiment 26, wherein the cell is a located in a brain of an individual.

[0101] Embodiment 28: The method of embodiment 27, wherein the individual is a human.

[0102] Embodiment 29: The method of embodiment 27, wherein the individual comprises a mutated FOXG1 gene.

[0103] Embodiment 30: The method of embodiment 27, wherein the individual has a FOXG1 disease or disorder.

[0104] Embodiment 31: The method of embodiment 30, wherein the FOXG1 disease or disorder is FOXG1 syndrome.

[0105] Embodiment 32: The method of any one of embodiments 26 to 31, wherein the FOXG1 nucleic acid is a ribonucleic acid (RNA).

[0106] Embodiment 33: The method of embodiment 32, wherein the RNA is a messenger RNA (mRNA).

[0107] Embodiment 34: The antisense oligonucleotide of any one of embodiments 32 to 33, wherein the antisense oligonucleotide inhibits regulatory elements (e.g. miRNA suppression, suppression by nucleic acid-binding proteins, nuclease digestion, etc.) that reduce translation or stability of the FOXG1 RNA, thereby increasing an amount of FOXG1 protein in a cell.

[0108] Embodiment 35: The method of any one of embodiments 26 to 34, wherein the antisense oligonucleotide is a single-stranded modified oligonucleotide.

[0109] Embodiment 36: The method of any one of embodiments 26 to 35, wherein the antisense oligonucleotide comprises at least one modified inter-nucleoside linkage.

[0110] Embodiment 37: The method of embodiment 36, wherein the modified inter-nucleoside linkage is a phosphorothioate inter-nucleoside linkage.

[0111] Embodiment 38: The method of any one of embodiments 26 to 37, wherein the antisense oligonucleotide comprises at least one phosphodiester inter-nucleoside linkage.

[0112] Embodiment 39: The method of any one of embodiments 26 to 38, wherein the antisense oligonucleotide comprises a modified nucleoside.

[0113] Embodiment 40: The method of embodiment 39, wherein the modified nucleoside comprises a modified sugar.

[0114] Embodiment 41: The method of embodiment 39, wherein the modified sugar is a bicyclic sugar.

[0115] Embodiment 42: The method of embodiment 39, wherein the modified sugar comprises a 2′-O-methoxyethyl group.

[0116] Embodiment 43: The method of any one of embodiments 26 to 42, wherein the antisense oligonucleotide comprises at least one phosphodiester inter-nucleoside linkage.

[0117] Embodiment 44: The method of any one of embodiments 27 to 43, wherein the target nucleic acid sequence is located at the 3′ UTR region of the FOXG1 nucleic acid.

[0118] Embodiment 45: The method of any one of embodiments 26 to 44, wherein the target sequence is located within a NM_005249.5_2000-2200_as region of the FOXG1 nucleic acid.

[0119] Embodiment 46: The method of embodiment 45, wherein the antisense oligonucleotide comprises SEQ ID NO: 100 or SEQ ID NO:103.

[0120] Embodiment 47: The method of any one of embodiments 26 to 44, wherein the target sequence is located within a NM_005249.5_2900-3000_as region of the FOXG1 nucleic acid.

[0121] Embodiment 48: The method of embodiment 47, wherein the antisense oligonucleotide comprises SEQ ID NO: 284, SEQ ID NO: 286, SEQ ID NO: 287, SEQ ID NO: 288, or SEQ ID NO: 289.

[0122] Embodiment 49: The method of any one of embodiments 26 to 48, wherein modulating expression comprises increasing expression of a FOXG1 protein in the cell.

[0123] Embodiment 50: The method of any one of embodiments 26 to 49, wherein modulating expression comprises increasing stability or half-life of the FOXG1 nucleic acid in the cell.

[0124] Embodiment 51: The method of any one of embodiments 26 to 50, wherein modulating expression comprises increasing translation of a FOXG1 protein in the cell.

[0125] Embodiment 52: The method of any one of embodiments 26 to 51, wherein the antisense oligonucleotide is administered to the individual by intrathecal injection, intracerebroventricular injection, inhalation, parenteral injection or infusion, or orally.

[0126] Embodiment 53: A method of treating or ameliorating a FOXG1 disease or disorder in an individual having, or at risk of having, the FOXG1 disease or disorder, comprising administering to the individual an antisense oligonucleotide, wherein the antisense oligonucleotide comprises a sequence complementary to a target sequence of the FOXG1 nucleic acid, thereby treating or ameliorating a FOXG1 disease in the individual.

[0127] Embodiment 54: The method of embodiment 53, wherein the individual is a human.

[0128] Embodiment 55: The method of embodiment 54, wherein the human is an unborn human.

[0129] Embodiment 56: The method of any one of embodiments 53 to 55, wherein the individual comprises a mutated FOXG1 gene.

[0130] Embodiment 57: The method of any one of embodiments 53 to 56, wherein the FOXG1 disease or disorder is FOXG1 syndrome.

[0131] Embodiment 58: The method of any one of embodiments 53 to 57, wherein the FOXG1 nucleic acid is a ribonucleic acid (RNA).

[0132] Embodiment 59: The method of embodiment 58, wherein the RNA molecule is a messenger RNA (mRNA).

[0133] Embodiment 60: The method of any one of embodiments 53 to 59, wherein the target sequence is located at a 3′ UTR region of the FOXG1 nucleic acid.

[0134] Embodiment 61: The method of any one of embodiments 53 to 60, wherein the target sequence is located within a NM_005249.5_2000-2200_as region of the FOXG1 nucleic acid.

[0135] Embodiment 62: The method of embodiment 61, wherein the antisense oligonucleotide comprises SEQ ID NO: 100, SEQ ID NO:103, or a combination thereof.

[0136] Embodiment 63: The method of any one of embodiments 53 to 60, wherein the target sequence is located within a NM_005249.5_2900-3000_as region of the FOXG1 nucleic acid.

[0137] Embodiment 64: The method of embodiment 63, wherein the antisense oligonucleotide comprises SEQ ID NO: 284, SEQ ID NO: 286, SEQ ID NO: 287, SEQ ID NO: 288, SEQ ID NO: 289, or any combination thereof.

[0138] Embodiment 65: The method of any one of embodiments 63 to 64, wherein the antisense oligonucleotide modulates expression of the FOXG1 nucleic acid in the individual.

[0139] Embodiment 66: The method of embodiment 65, wherein modulating expression comprises increasing stability or half-life of the FOXG1 nucleic acid in the individual.

[0140] Embodiment 67: The method of any one of embodiments 65 to 66, wherein modulating expression comprises increasing translation of a FOXG1 protein in the individual.

[0141] Embodiment 68: The method of any one of embodiments 65 to 66, wherein modulating expression comprises increasing translation of a FOXG1 protein in the individual.

[0142] Embodiment 69: The method of any one of embodiments 65 to 68, wherein modulating expression comprises increasing an amount of FOXG1 a cell of the individual.

[0143] Embodiment 70: The method of embodiment 69, wherein the cell is located in the brain of the individual.

[0144] Embodiment 71: The method of embodiment 70, wherein the cell is an astrocyte or a fibroblast.

[0145] Embodiment 72: The method of embodiment 27, wherein the cell is an astrocyte or a fibroblast

[0146] Embodiment 73: An antisense oligonucleotide comprising an antisense oligonucleotide sequence that hybridizes to a target nucleic acid sequence located within positions 2000-2100 or 2900-3000 of a FOXG1 nucleic acid (e.g., FOXG1 mRNA).

[0147] Embodiment 74: The antisense oligonucleotide of embodiment 73, wherein antisense oligonucleotide comprises a modification.

[0148] Embodiment 75: The antisense oligonucleotide of embodiment 74, wherein the modification comprises a modified inter-nucleoside linker, a modified nucleoside, or a combination thereof.

[0149] Embodiment 76 The antisense oligonucleotide of embodiment 75, wherein the antisense oligonucleotide comprises a modified inter-nucleoside linkage.

[0150] Embodiment 77: The antisense oligonucleotide of any one of embodiments 73 to 76, wherein the antisense oligonucleotide sequence comprises SEQ ID NO: 100, SEQ ID NO:103, SEQ ID NO: 284, SEQ ID NO: 286, SEQ ID NO: 287, SEQ ID NO: 288, or SEQ ID NO: 289.

[0151] Embodiment 78: The antisense oligonucleotide of any one of embodiments 73 to 76, wherein the antisense oligonucleotide hybridizes to one or more nucleotides within or adjacent to a position on the FOXG1 nucleic acid targeted by SEQ ID NO: 100, SEQ ID NO:103, SEQ ID NO: 284, SEQ ID NO: 286, SEQ ID NO: 287, SEQ ID NO: 288, or SEQ ID NO: 289.

[0152] Embodiment 79: The antisense oligonucleotide of any one of embodiments 73 to 76, wherein the antisense oligonucleotide hybridizes to one or more nucleotides within a position on the FOXG1 nucleic acid targeted by SEQ ID NO: 100, SEQ ID NO:103, SEQ ID NO: 284, SEQ ID NO: 286, SEQ ID NO: 287, SEQ ID NO: 288, or SEQ ID NO: 289.

[0153] Embodiment 80: The antisense oligonucleotide of any one of embodiments 73 to 79, wherein the antisense oligonucleotide sequence comprises 80% sequence identity or greater to SEQ ID NO: 100, SEQ ID NO: 103, SEQ ID NO: 284, SEQ ID NO: 286, SEQ ID NO: 287, SEQ ID NO: 288, or SEQ ID NO: 289

[0154] Embodiment 81: The antisense oligonucleotide of any one of embodiments 73 to 79, wherein the antisense oligonucleotide sequence comprises 90% sequence identity or greater to SEQ ID NO: 100, SEQ ID NO: 103, SEQ ID NO: 284, SEQ ID NO: 286, SEQ ID NO: 287, SEQ ID NO: 288, or SEQ ID NO: 289.

[0155] Embodiment 82: The antisense oligonucleotide of any one of embodiments 73 to 79, wherein the antisense oligonucleotide sequence comprises 10 or more contiguous nucleotides selected from a sequence within SEQ ID NO: 100, SEQ ID NO: 103, SEQ ID NO: 284, SEQ ID NO: 286, SEQ ID NO: 287, SEQ ID NO: 288, or SEQ ID NO: 289

### Examples

[0156] The following examples are included for illustrative purposes only and are not intended to limit the scope of the present disclosure.

### Example 1: Design and Selection of ASOs

[0157] Non-cleaving antisense oligonucleotides (“oligos”) against the human FOXG1 mRNA were chosen as follows. The full-length human FOXG1 mRNA (accession number NM_005249.5) was downloaded from the NCBI RefSeq database and served as template for all designs. All possible twenty-mer (“20 mer”) nucleotide subsequences that were reverse-complementary to the FOXG1 5′-UTR and 3′-UTR (NM_005249.5 coordinates 1-493 and 1964-3491, respectively) were assembled. Thermal and sequence characteristics were then used to initially subset the oligos as follows:
[0158] 5′-UTR: GC content 15-70%; Tₘ 25-70° C.; Tₕₐᵢᵣₚᵢₙ<40° C.; T_{homodimer}<30° C.; no G homopolymers ≥4 bases long; no A, T, or C homopolymers ≥6 bases long
[0159] 3′-UTR: GC content 20-60%; Tₘ 30-65° C.; Tₕₐᵢᵣₚᵢₙ<35° C.; T_{homodimer}<25° C.; no G homopolymers ≥4 bases long; no A, T, or C homopolymers ≥6 bases long

[0160] Different characteristics were used in the initial selection step (above) for 5′-UTR and 3′-UTR oligos due to the larger number of candidates for the 3′-UTR. In the above, Tₘ=Melting temperature of hybridization; Tₕₐᵢᵣₚᵢₙ=temperature of hairpin formation; T_{homodimer}=temperature of homodimer formation, as predicted by the Biopython software package (iittplibio.python.org).

[0161] These selected 20 mers were then further selected for specificity via sequence alignment to the complete human RefSeq unspliced transcriptome (downloaded Mar. 26, 2020). Alignment was conducted using the FASTA software suite (https://fasta.bioch.virginia.edu/fasta/fasta_list.html). Alignments were parsed using custom software, and the “off-target” score for each oligo was calculated as the lowest number of mismatches to any transcript other than FOXG1.

[0162] Next, the secondary structure of NM_005249.5 was predicted using the RNAstructure algorithm (https://rna.urmc.rochester.edu/RNAstructure.html). The oligo walk feature was used to predict the ΔG of target mRNA: oligo duplex formation with local structure invasion for each oligo. These predicted ΔG values were used in conjunction with off-target scores (above) to make the final selection of oligos as follows:
[0163] 5′-UTR (84 oligos): ≥1 mismatch to all human off-target transcripts; no ΔG cutoff
[0164] 3′-UTR (300 oligo): ≥2 mismatches to all human off-target transcripts; ΔG<−5.8° C.

[0165] The resulting set of 384 oligos, off-target scores, and ΔG values is listed in TABLE 1 and TABLE 2. In TABLE 1 and TABLE 2, exemplary chemical modifications are shown wherein “m” denotes 2′-O-Me bases, “d” denotes deoxyribo (DNA) bases, and “s” denotes phosphorothioate backbone.

TABLE 1
Antisense oligonucleotides targeting the 5′ UTR

| SEQ | | | Off- | | | |
|---|---|---|---|---|---|---|
| ID | NUCLEOBASE | | Target | ΔG | Exemplary Modified | SEQ ID |
| NO | SEQUENCE | Oligo Name | Score | Target | Sequence | NO |
| 1 | AGCGATCGA | NM_005249.5_ | 3 | −4.8 | mAsdGsmCsdGsmAsd | 385 |
| | GGCGGCTAT | 9-28_as | | | TsmCsdGsmAsdGsmG | |
| | AG | | | | sdCsmGsdGsmCsdTsm | |
| | | | | | AsdTsmAsdG | |
| 2 | CAGCGATCG | NM_005249.5_ | 3 | −16 | mCsdAsmGsdCsmGsd | 386 |
| | AGGCGGCTA | 10-29_as | | | AsmUsdCsmGsdAsmG | |
| | TA | | | | sdGsmCsdGsmGsdCs | |
| | | | | | mUsdAsmUsdA | |
| 3 | ACAGCGATC | NM_005249.5_ | 3 | −16.7 | mAsdCsmAsdGsmCsd | 387 |
| | GAGGCGGCT | 11-30_as | | | GsmAsdTsmCsdGsmA | |
| | AT | | | | sdGsmGsdCsmGsdGs | |
| | | | | | mCsdTsmAsdT | |
| 4 | GACAGCGAT | NM_005249.5_ | 3 | −14.1 | mGsdAsmCsdAsmGsd | 388 |
| | CGAGGCGGC | 12-31_as | | | CsmGsdAsmUsdCsmG | |
| | TA | | | | sdAsmGsdGsmCsdGs | |
| | | | | | mGsdCsmUsdA | |
| 5 | AGACAGCG | NM_005249.5_1 | 2 | −10.9 | mAsdGsmAsdCsmAsd | 389 |
| | ATCGAGGCG | 3-32_as | | | GsmCsdGsmAsdTsmC | |
| | GCT | | | | sdGsmAsdGsmGsdCs | |
| | | | | | mGsdGsmCsdT | |
| 6 | GCAGCAGTC | NM_005249.5_ | 1 | 16.4 | mGsdCsmAsdGsmCsd | 390 |
| | ACAGCAGCA | 106-125_as | | | AsmGsdTsmCsdAsmC | |
| | GC | | | | sdAsmGsdCsmAsdGs | |
| | | | | | mCsdAsmGsdC | |
| 7 | CGCAGCAGC | NM_005249.5_ | 2 | 0.4 | mCsdGsmCsdAsmGsd | 391 |
| | AGTCACAGC | 110-129_as | | | CsmAsdGsmCsdAsmG | |
| | AG | | | | sdTsmCsdAsmCsdAsm | |
| | | | | | GsdCsmAsdG | |
| 8 | TCGCAGCAG | NM_005249.5_ | 2 | −3.4 | mUsdCsmGsdCsmAsd | 392 |
| | CAGTCACAG | 111- | | | GsmCsdAsmGsdCsmA | |
| | CA | 130_as | | | sdGsmUsdCsmAsdCs | |
| | | | | | mAsdGsmCsdA | |
| 9 | CTCGCAGCA | NM_005249.5_ | 2 | −5.1 | mCsdTsmCsdGsmCsd | 393 |
| | GCAGTCACA | 112- | | | AsmGsdCsmAsdGsmC | |
| | GC | 131_as | | | sdAsmGsdTsmCsdAsm | |
| | | | | | CsdAsmGsdC | |
| 10 | TCTCGCAGC | NM_005249.5_ | 2 | −6.6 | mUsdCsmUsdCsmGsd | 394 |
| | AGCAGTCAC | 113- | | | CsmAsdGsmCsdAsmG | |
| | AG | 132_as | | | sdCsmAsdGsmUsdCs | |
| | | | | | mAsdCsmAsdG | |
| 11 | CTCTCGCAG | NM_005249.5_ | 2 | −10.9 | mCsdTsmCsdTsmCsd | 395 |
| | CAGCAGTCA | 114- | | | GsmCsdAsmGsdCsmA | |
| | CA | 133_as | | | sdGsmCsdAsmGsdTsm | |
| | | | | | CsdAsmCsdA | |
| 12 | CCTCTCGCA | NM_005249.5_ | 2 | −13.7 | mCsdCsmUsdCsmUsd | 396 |
| | GCAGCAGTC | 115- | | | CsmGsdCsmAsdGsmC | |
| | AC | 134_as | | | sdAsmGsdCsmAsdGs | |
| | | | | | mUsdCsmAsdC | |
| 13 | TCCTCTCGC | NM_005249.5_ | 2 | −16.7 | mUsdCsmCsdTsmCsd | 397 |
| | AGCAGCAGT | 116- | | | TsmCsdGsmCsdAsmG | |
| | CA | 135_as | | | sdCsmAsdGsmCsdAs | |
| | | | | | mGsdTsmCsdA | |
| 14 | CTCCTCTCG | NM_005249.5_ | 2 | −18.8 | mCsdTsmCsdCsmUsd | 398 |
| | CAGCAGCAG | 117- | | | CsmUsdCsmGsdCsmA | |
| | TC | 136_as | | | sdGsmCsdAsmGsdCs | |
| | | | | | mAsdGsmUsdC | |
| 15 | CCTCCTCTC | NM_005249.5_ | 2 | −22.6 | mCsdCsmUsdCsmCsd | 399 |
| | GCAGCAGCA | 118- | | | TsmCsdTsmCsdGsmCs | |
| | GT | 137_as | | | dAsmGsdCsmAsdGsm | |
| | | | | | CsdAsmGsdT | |
| 16 | TCCTCCTCT | NM_005249.5_ | 2 | −21.8 | mUsdCsmCsdTsmCsd | 400 |
| | CGCAGCAGC | 119- | | | CsmUsdCsmUsdCsmG | |
| | AG | 138_as | | | sdCsmAsdGsmCsdAs | |
| | | | | | mGsdCsmAsdG | |
| 17 | CTCCTCCTC | NM_005249.5_ | 2 | −22.7 | mCsdTsmCsdCsmUsd | 401 |
| | TCGCAGCAG | 120- | | | CsmCsdTsmCsdTsmCs | |
| | CA | 139_as | | | dGsmCsdAsmGsdCsm | |
| | | | | | AsdGsmCsdA | |
| 18 | TCCTCCTCC | NM_005249.5_ | 2 | −23.6 | mUsdCsmCsdTsmCsd | 402 |
| | TCTCGCAGC | 122- | | | CsmUsdCsmCsdTsmC | |
| | AG | 141_as | | | sdTsmCsdGsmCsdAsm | |
| | | | | | GsdCsmAsdG | |
| 19 | CTCCTCCTC | NM_005249.5_ | 1 | −20.1 | mCsdTsmCsdCsmUsd | 403 |
| | CTCTCGCAG | 123- | | | CsmCsdTsmCsdCsmU | |
| | CA | 142_as | | | sdCsmUsdCsmGsdCsm | |
| | | | | | AsdGsmCsdA | |
| 20 | TCCTCCTCC | NM_005249.5_ | 1 | −20.8 | mUsdCsmCsdTsmCsd | 404 |
| | TCCTCTCGC | 125- | | | CsmUsdCsmCsdTsmC | |
| | AG | 144_as | | | sdCsmUsdCsmUsdCsm | |
| | | | | | GsdCsmAsdG | |
| 21 | CTCCTCCTC | NM_005249.5_ | 1 | −17.3 | mCsdTsmCsdCsmUsd | 405 |
| | CTCCTCTCG | 126- | | | CsmCsdTsmCsdCsmU | |
| | CA | 145_as | | | sdCsmCsdTsmCsdTsm | |
| | | | | | CsdGsmCsdA | |
| 22 | GCTGCTTCC | NM_005249.5_ | 1 | −11.5 | mGsdCsmUsdGsmCsd | 406 |
| | TCCTCCTCC | 137- | | | TsmUsdCsmCsdTsmCs | |
| | TC | 156_as | | | dCsmUsdCsmCsdTsm | |
| | | | | | CsdCsmUsdC | |
| 23 | CGCTGCTTC | NM_005249.5_ | 1 | −7.9 | mCsdGsmCsdTsmGsd | 407 |
| | CTCCTCCTC | 138- | | | CsmUsdTsmCsdCsmU | |
| | CT | 157_as | | | sdCsmCsdTsmCsdCsm | |
| | | | | | UsdCsmCsdT | |
| 24 | TGTACTTCT | NM_005249.5_ | 2 | −14.3 | mUsdGsmUsdAsmCsd | 408 |
| | TGGTCTCCC | 179- | | | TsmUsdCsmUsdTsmG | |
| | CC | 198_as | | | sdGsmUsdCsmUsdCs | |
| | | | | | mCsdCsmCsdC | |
| 25 | CTGTACTTC | NM_005249.5_ | 2 | −17.5 | mCsdTsmGsdTsmAsd | 409 |
| | TTGGTCTCC | 180- | | | CsmUsdTsmCsdTsmU | |
| | CC | 199_as | | | sdGsmGsdTsmCsdTsm | |
| | | | | | CsdCsmCsdC | |
| 26 | ACTGTACTT | NM_005249.5_ | 2 | −15.7 | mAsdCsmUsdGsmUsd | 410 |
| | CTTGGTCTC | 181- | | | AsmCsdTsmUsdCsmU | |
| | CC | 200_as | | | sdTsmGsdGsmUsdCsm | |
| | | | | | UsdCsmCsdC | |
| 27 | AACTGTACT | NM_005249.5_ | 2 | −10.7 | mAsdAsmCsdTsmGsd | 411 |
| | TCTTGGTCT | 182- | | | TsmAsdCsmUsdTsmC | |
| | CC | 201_as | | | sdTsmUsdGsmGsdTsm | |
| | | | | | CsdTsmCsdC | |
| 28 | CAACTGTAC | NM_005249.5_ | 2 | −11.6 | mCsdAsmAsdCsmUsd | 412 |
| | TTCTTGGTC | 183- | | | GsmUsdAsmCsdTsmU | |
| | TC | 202_as | | | sdCsmUsdTsmGsdGsm | |
| | | | | | UsdCsmUsdC | |
| 29 | CCAACTGTA | NM_005249.5_ | 2 | −11.9 | mCsdCsmAsdAsmCsd | 413 |
| | CTTCTTGGT | 184- | | | TsmGsdTsmAsdCsmU | |
| | CT | 203_as | | | sdTsmCsdTsmUsdGsm | |
| | | | | | GsdTsmCsdT | |
| 30 | CCCAACTGT | NM_005249.5_ | 2 | −11 | mCsdCsmCsdAsmAsd | 414 |
| | ACTTCTTGG | 185- | | | CsmUsdGsmUsdAsmC | |
| | TC | 204_as | | | sdTsmUsdCsmUsdTsm | |
| | | | | | GsdGsmUsdC | |
| 31 | TCCCAACTG | NM_005249.5_ | 3 | −11 | mUsdCsmCsdCsmAsd | 415 |
| | TACTTCTTG | 186- | | | AsmCsdTsmGsdTsmA | |
| | GT | 205_as | | | sdCsmUsdTsmCsdTsm | |
| | | | | | UsdGsmGsdT | |
| 32 | CTCCCAACT | NM_005249.5_ | 2 | −13.8 | mCsdTsmCsdCsmCsd | 416 |
| | GTACTTCTT | 187- | | | AsmAsdCsmUsdGsmU | |
| | GG | 206_as | | | sdAsmCsdTsmUsdCsm | |
| | | | | | UsdTsmGsdG | |
| 33 | GCTCCCAAC | NM_005249.5_ | 2 | −15.3 | mGsdCsmUsdCsmCsd | 417 |
| | TGTACTTCT | 188- | | | CsmAsdAsmCsdTsmG | |
| | TG | 207_as | | | sdTsmAsdCsmUsdTsm | |
| | | | | | CsdTsmUsdG | |
| 34 | CGCTCCCAA | NM_005249.5_ | 2 | −14.8 | mCsdGsmCsdTsmCsd | 418 |
| | CTGTACTTC | 189- | | | CsmCsdAsmAsdCsmU | |
| | TT | 208_as | | | sdGsmUsdAsmCsdTsm | |
| | | | | | UsdCsmUsdT | |
| 35 | TCGCTCCCA | NM_005249.5_ | 2 | −12 | mUsdCsmGsdCsmUsd | 419 |
| | ACTGTACTT | 190- | | | CsmCsdCsmAsdAsmC | |
| | CT | 209_as | | | sdTsmGsdTsmAsdCsm | |
| | | | | | UsdTsmCsdT | |
| 36 | CTCGCTCCC | NM_005249.5_ | 2 | −11.5 | mCsdTsmCsdGsmCsd | 420 |
| | AACTGTACT | 191- | | | TsmCsdCsmCsdAsmA | |
| | TC | 210_as | | | sdCsmUsdGsmUsdAs | |
| | | | | | mCsdTsmUsdC | |
| 37 | CCTCGCTCC | NM_005249.5_ | 2 | −11.5 | mCsdCsmUsdCsmGsd | 421 |
| | CAACTGTAC | 192- | | | CsmUsdCsmCsdCsmA | |
| | TT | 211_as | | | sdAsmCsdTsmGsdTsm | |
| | | | | | AsdCsmUsdT | |
| 38 | CCCTCGCTC | NM_005249.5_ | 2 | −13.4 | mCsdCsmCsdTsmCsd | 422 |
| | CCAACTGTA | 193- | | | GsmCsdTsmCsdCsmC | |
| | CT | 212_as | | | sdAsmAsdCsmUsdGs | |
| | | | | | mUsdAsmCsdT | |
| 39 | TCCCTCGCT | NM_005249.5_ | 2 | −13.2 | mUsdCsmCsdCsmUsd | 423 |
| | CCCAACTGT | 194- | | | CsmGsdCsmUsdCsmC | |
| | AC | 213_as | | | sdCsmAsdAsmCsdTsm | |
| | | | | | GsdTsmAsdC | |
| 40 | CTCCCTCGC | NM_005249.5_ | 1 | −15.5 | mCsdTsmCsdCsmCsd | 424 |
| | TCCCAACTG | 195- | | | TsmCsdGsmCsdTsmCs | |
| | TA | 214_as | | | dCsmCsdAsmAsdCsm | |
| | | | | | UsdGsmUsdA | |
| 41 | GCTCCCTCG | NM_005249.5_ | 2 | −20.2 | mGsdCsmUsdCsmCsd | 425 |
| | CTCCCAACT | 196- | | | CsmUsdCsmGsdCsmU | |
| | GT | 215_as | | | sdCsmCsdCsmAsdAsm | |
| | | | | | CsdTsmGsdT | |
| 42 | AGCTCCCTC | NM_005249.5_ | 3 | −18.5 | mAsdGsmCsdTsmCsd | 426 |
| | GCTCCCAAC | 197- | | | CsmCsdTsmCsdGsmC | |
| | TG | 216_as | | | sdTsmCsdCsmCsdAsm | |
| | | | | | AsdCsmUsdG | |
| 43 | AAGCTCCCT | NM_005249.5_ | 2 | −16.1 | mAsdAsmGsdCsmUsd | 427 |
| | CGCTCCCAA | 198- | | | CsmCsdCsmUsdCsmG | |
| | CT | 217_as | | | sdCsmUsdCsmCsdCsm | |
| | | | | | AsdAsmCsdT | |
| 44 | GAAGCTCCC | NM_005249.5_ | 2 | −9.4 | mGsdAsmAsdGsmCsd | 428 |
| | TCGCTCCCA | 199- | | | TsmCsdCsmCsdTsmCs | |
| | AC | 218_as | | | dGsmCsdTsmCsdCsm | |
| | | | | | CsdAsmAsdC | |
| 45 | TGAAGCTCC | NM_005249.5_ | 2 | −11.1 | mUsdGsmAsdAsmGsd | 429 |
| | CTCGCTCCC | 200- | | | CsmUsdCsmCsdCsmU | |
| | AA | 219_as | | | sdCsmGsdCsmUsdCsm | |
| | | | | | CsdCsmAsdA | |
| 46 | GTGAAGCTC | NM_005249.5_ | 2 | −9.7 | mGsdTsmGsdAsmAsd | 430 |
| | CCTCGCTCC | 201- | | | GsmCsdTsmCsdCsmC | |
| | CA | 220_as | | | sdTsmCsdGsmCsdTsm | |
| | | | | | CsdCsmCsdA | |
| 47 | AAGAAACA | NM_005249.5_ | 3 | −5.7 | mAsdAsmGsdAsmAsd | 431 |
| | ACCACCGCC | 224- | | | AsmCsdAsmAsdCsmC | |
| | CCG | 243_as | | | sdAsmCsdCsmGsdCsm | |
| | | | | | CsdCsmCsdG | |
| 48 | AAAGAAAC | NM_005249.5_ | 2 | −5.7 | mAsdAsmAsdGsmAsd | 432 |
| | AACCACCGC | 225- | | | AsmAsdCsmAsdAsmC | |
| | CCC | 244_as | | | sdCsmAsdCsmCsdGsm | |
| | | | | | CsdCsmCsdC | |
| 49 | AAAAGAAA | NM_005249.5_ | 2 | −3 | mAsdAsmAsdAsmGsd | 433 |
| | CAACCACCG | 226- | | | AsmAsdAsmCsdAsmA | |
| | CCC | 245_as | | | sdCsmCsdAsmCsdCsm | |
| | | | | | GsdCsmCsdC | |
| 50 | AAAAAGAA | NM_005249.5_ | 2 | 0.1 | mAsdAsmAsdAsmAsd | 434 |
| | ACAACCACC | 227- | | | GsmAsdAsmAsdCsmA | |
| | GCC | 246_as | | | sdAsmCsdCsmAsdCsm | |
| | | | | | CsdGsmCsdC | |
| 51 | CCCCTCAGG | NM_005249.5_ | 2 | −4 | mCsdCsmCsdCsmUsd | 435 |
| | AATTAGAAA | 280- | | | CsmAsdGsmGsdAsmA | |
| | AA | 299_as | | | sdTsmUsdAsmGsdAs | |
| | | | | | mAsdAsmAsdA | |
| 52 | ACCCCTCAG | NM_005249.5_ | 2 | −3.9 | mAsdCsmCsdCsmCsd | 436 |
| | GAATTAGAA | 281- | | | TsmCsdAsmGsdGsmA | |
| | AA | 300_as | | | sdAsmUsdTsmAsdGs | |
| | | | | | mAsdAsmAsdA | |
| 53 | CACCCCTCA | NM_005249.5_ | 2 | −1.2 | mCsdAsmCsdCsmCsd | 437 |
| | GGAATTAGA | 282- | | | CsmUsdCsmAsdGsmG | |
| | AA | 301_as | | | sdAsmAsdTsmUsdAs | |
| | | | | | mGsdAsmAsdA | |
| 54 | CCACCCCTC | NM_005249.5_ | 2 | −0.8 | mCsdCsmAsdCsmCsd | 438 |
| | AGGAATTAG | 283- | | | CsmCsdTsmCsdAsmG | |
| | AA | 302_as | | | sdGsmAsdAsmUsdTs | |
| | | | | | mAsdGsmAsdA | |
| 55 | ACCACCCCT | NM_005249.5_ | 2 | −3.6 | mAsdCsmCsdAsmCsd | 439 |
| | CAGGAATTA | 284- | | | CsmCsdCsmUsdCsmA | |
| | GA | 303_as | | | sdGsmGsdAsmAsdTs | |
| | | | | | mUsdAsmGsdA | |
| 56 | AACCACCCC | NM_005249.5_ | 2 | −2.3 | mAsdAsmCsdCsmAsd | 440 |
| | TCAGGAATT | 285- | | | CsmCsdCsmCsdTsmCs | |
| | AG | 304_as | | | dAsmGsdGsmAsdAsm | |
| | | | | | UsdTsmAsdG | |
| 57 | CAACCACCC | NM_005249.5_ | 2 | 0.2 | mCsdAsmAsdCsmCsd | 441 |
| | CTCAGGAAT | 286- | | | AsmCsdCsmCsdCsmU | |
| | TA | 305_as | | | sdCsmAsdGsmGsdAs | |
| | | | | | mAsdTsmUsdA | |
| 58 | GCAACCACC | NM_005249.5_ | 3 | 0.8 | mGsdCsmAsdAsmCsd | 442 |
| | CCTCAGGAA | 287- | | | CsmAsdCsmCsdCsmC | |
| | TT | 306_as | | | sdTsmCsdAsmGsdGsm | |
| | | | | | AsdAsmUsdT | |
| 59 | AGCAACCAC | NM_005249.5_ | 2 | 1.8 | mAsdGsmCsdAsmAsd | 443 |
| | CCCTCAGGA | 288- | | | CsmCsdAsmCsdCsmC | |
| | AT | 307_as | | | sdCsmUsdCsmAsdGs | |
| | | | | | mGsdAsmAsdT | |
| 60 | CAGCAACCA | NM_005249.5_ | 2 | −7.1 | mCsdAsmGsdCsmAsd | 444 |
| | CCCCTCAGG | 289- | | | AsmCsdCsmAsdCsmC | |
| | AA | 308_as | | | sdCsmCsdTsmCsdAsm | |
| | | | | | GsdGsmAsdA | |
| 61 | GCAGCAACC | NM_005249.5_ | 1 | −9.6 | mGsdCsmAsdGsmCsd | 445 |
| | ACCCCTCAG | 290- | | | AsmAsdCsmCsdAsmC | |
| | GA | 309_as | | | sdCsmCsdCsmUsdCsm | |
| | | | | | AsdGsmGsdA | |
| 62 | AAGCAGCA | NM_005249.5_ | 1 | −7.6 | mAsdAsmGsdCsmAsd | 446 |
| | ACCACCCCT | 292- | | | GsmCsdAsmAsdCsmC | |
| | CAG | 311_as | | | sdAsmCsdCsmCsdCsm | |
| | | | | | UsdCsmAsdG | |
| 63 | AAAGCAGC | NM_005249.5_ | 2 | 2.4 | mAsdAsmAsdGsmCsd | 447 |
| | AACCACCCC | 293- | | | AsmGsdCsmAsdAsmC | |
| | TCA | 312_as | | | sdCsmAsdCsmCsdCsm | |
| | | | | | CsdTsmCsdA | |
| 64 | AAAAGCAG | NM_005249.5_ | 2 | 2.6 | mAsdAsmAsdAsmGsd | 448 |
| | CAACCACCC | 294- | | | CsmAsdGsmCsdAsmA | |
| | CTC | 313_as | | | sdCsmCsdAsmCsdCsm | |
| | | | | | CsdCsmUsdC | |
| 65 | CAAAAGCA | NM_005249.5_ | 2 | −1 | mCsdAsmAsdAsmAsd | 449 |
| | GCAACCACC | 295- | | | GsmCsdAsmGsdCsmA | |
| | CCT | 314_as | | | sdAsmCsdCsmAsdCsm | |
| | | | | | CsdCsmCsdT | |
| 66 | GCAAAAGC | NM_005249.5_ | 2 | −1.4 | mGsdCsmAsdAsmAsd | 450 |
| | AGCAACCAC | 296- | | | AsmGsdCsmAsdGsmC | |
| | CCC | 315_as | | | sdAsmAsdCsmCsdAs | |
| | | | | | mCsdCsmCsdC | |
| 67 | AGCAAAAG | NM_005249.5_ | 2 | 1 | mAsdGsmCsdAsmAsd | 451 |
| | CAGCAACCA | 297- | | | AsmAsdGsmCsdAsmG | |
| | CCC | 316_as | | | sdCsmAsdAsmCsdCsm | |
| | | | | | AsdCsmCsdC | |
| 68 | TAGCAAAAG | NM_005249.5_ | 1 | 0 | mUsdAsmGsdCsmAsd | 452 |
| | CAGCAACCA | 298- | | | AsmAsdAsmGsdCsmA | |
| | CC | 317_as | | | sdGsmCsdAsmAsdCs | |
| | | | | | mCsdAsmCsdC | |
| 69 | GTAGCAAAA | NM_005249.5_ | 2 | −2.6 | mGsdTsmAsdGsmCsd | 453 |
| | GCAGCAACC | 299- | | | AsmAsdAsmAsdGsmC | |
| | AC | 318_as | | | sdAsmGsdCsmAsdAs | |
| | | | | | mCsdCsmAsdC | |
| 70 | TGTAGCAAA | NM_005249.5_ | 1 | −5.3 | mUsdGsmUsdAsmGsd | 454 |
| | AGCAGCAAC | 300- | | | CsmAsdAsmAsdAsmG | |
| | CA | 319_as | | | sdCsmAsdGsmCsdAs | |
| | | | | | mAsdCsmCsdA | |
| 71 | ATGTAGCAA | NM_005249.5_ | 2 | −6.1 | mAsdTsmGsdTsmAsd | 455 |
| | AAGCAGCA | 301- | | | GsmCsdAsmAsdAsmA | |
| | ACC | 320_as | | | sdGsmCsdAsmGsdCs | |
| | | | | | mAsdAsmCsdC | |
| 72 | CATGTAGCA | NM_005249.5_ | 2 | −3.5 | mCsdAsmUsdGsmUsd | 456 |
| | AAAGCAGC | 302- | | | AsmGsdCsmAsdAsmA | |
| | AAC | 321_as | | | sdAsmGsdCsmAsdGs | |
| | | | | | mCsdAsmAsdC | |
| 73 | TCATGTAGC | NM_005249.5_ | 2 | −5.3 | mUsdCsmAsdTsmGsd | 457 |
| | AAAAGCAG | 303- | | | TsmAsdGsmCsdAsmA | |
| | CAA | 322_as | | | sdAsmAsdGsmCsdAs | |
| | | | | | mGsdCsmAsdA | |
| 74 | GTCATGTAG | NM_005249.5_ | 2 | −5.7 | mGsdTsmCsdAsmUsd | 458 |
| | CAAAAGCA | 304- | | | GsmUsdAsmGsdCsmA | |
| | GCA | 323_as | | | sdAsmAsdAsmGsdCs | |
| | | | | | mAsdGsmCsdA | |
| 75 | AGTCATGTA | NM_005249.5_ | 2 | −8.1 | mAsdGsmUsdCsmAsd | 459 |
| | GCAAAAGC | 305- | | | TsmGsdTsmAsdGsmC | |
| | AGC | 324_as | | | sdAsmAsdAsmAsdGs | |
| | | | | | mCsdAsmGsdC | |
| 76 | AAGTCATGT | NM_005249.5_ | 2 | −5.5 | mAsdAsmGsdTsmCsd | 460 |
| | AGCAAAAG | 306- | | | AsmUsdGsmUsdAsmG | |
| | CAG | 325_as | | | sdCsmAsdAsmAsdAs | |
| | | | | | mGsdCsmAsdG | |
| 77 | CAAGTCATG | NM_005249.5_ | 1 | −5.7 | mCsdAsmAsdGsmUsd | 461 |
| | TAGCAAAAG | 307- | | | CsmAsdTsmGsdTsmA | |
| | CA | 326_as | | | sdGsmCsdAsmAsdAs | |
| | | | | | mAsdGsmCsdA | |
| 78 | GCAAGTCAT | NM_005249.5_ | 2 | −8.1 | mGsdCsmAsdAsmGsd | 462 |
| | GTAGCAAAA | 308- | | | TsmCsdAsmUsdGsmU | |
| | GC | 327_as | | | sdAsmGsdCsmAsdAs | |
| | | | | | mAsdAsmGsdC | |
| 79 | GGCAAGTCA | NM_005249.5_ | 2 | −10.4 | mGsdGsmCsdAsmAsd | 463 |
| | TGTAGCAAA | 309- | | | GsmUsdCsmAsdTsmG | |
| | AG | 328_as | | | sdTsmAsdGsmCsdAsm | |
| | | | | | AsdAsmAsdG | |
| 80 | TGGCAAGTC | NM_005249.5_ | 2 | −9.2 | mUsdGsmGsdCsmAsd | 464 |
| | ATGTAGCAA | 310- | | | AsmGsdTsmCsdAsmU | |
| | AA | 329_as | | | sdGsmUsdAsmGsdCs | |
| | | | | | mAsdAsmAsdA | |
| 81 | CTGGCAAGT | NM_005249.5_ | 2 | −11.1 | mCsdTsmGsdGsmCsd | 465 |
| | CATGTAGCA | 311- | | | AsmAsdGsmUsdCsmA | |
| | AA | 330_as | | | sdTsmGsdTsmAsdGsm | |
| | | | | | CsdAsmAsdA | |
| 82 | GCTGGCAAG | NM_005249.5_ | 2 | −12.5 | mGsdCsmUsdGsmGsd | 466 |
| | TCATGTAGC | 312- | | | CsmAsdAsmGsdTsmC | |
| | AA | 331_as | | | sdAsmUsdGsmUsdAs | |
| | | | | | mGsdCsmAsdA | |
| 83 | CGCTGGCAA | NM_005249.5_ | 2 | −10.6 | mCsdGsmCsdTsmGsd | 467 |
| | GTCATGTAG | 313- | | | GsmCsdAsmAsdGsmU | |
| | CA | 332_as | | | sdCsmAsdTsmGsdTsm | |
| | | | | | AsdGsmCsdA | |
| 84 | GCGCTGGCA | NM_005249.5_ | 3 | -14.6 | mGsdCsmGsdCsmUsd | 468 |
| | AGTCATGTA | 314- | | | GsmGsdCsmAsdAsmG | |
| | GC | 333_as | | | sdTsmCsdAsmUsdGsm | |
| | | | | | UsdAsmGsdC | |

TABLE 2
Antisense oligonucleotides targeting the 3′ UTR

| SEQ | | | Off- | | | |
|---|---|---|---|---|---|---|
| ID | NUCLEOBASE | Oligo | Target | AG | Exemplary Modified | SEQ ID |
| NO | SEQUENCE | Name | Score | Target | Sequence | NO |
| 85 | TCACTTACAG | NM_00524 | 2 | −8.3 | mUsdCsmAsdCsmUsd | 469 |
| | TCTGGTCCCA | 9.5_1970- | | | TsmAsdCsmAsdGsmU | |
| | | 1989_as | | | sdCsmUsdGsmGsdTs | |
| | | | | | mCsdCsmCsdA | |
| 86 | TTCACTTACA | NM_00524 | 2 | −7.6 | mUsdTsmCsdAsmCsd | 470 |
| | GTCTGGTCCC | 9.5_1971- | | | TsmUsdAsmCsdAsmG | |
| | | 1990_as | | | sdTsmCsdTsmGsdGsm | |
| | | | | | UsdCsmCsdC | |
| 87 | ACGTTCACTT | NM_00524 | 3 | −8 | mAsdCsmGsdTsmUsd | 471 |
| | ACAGTCTGG | 9.5_1974- | | | CsmAsdCsmUsdTsmA | |
| | T | 1993_as | | | sdCsmAsdGsmUsdCs | |
| | | | | | mUsdGsmGsdT | |
| 88 | GTGTAAAAC | NM_00524 | 2 | −7.4 | mGsdTsmGsdTsmAsd | 472 |
| | GTTCACTTAC | 9.5_1981- | | | AsmAsdAsmCsdGsmU | |
| | A | 2000_as | | | sdTsmCsdAsmCsdTsm | |
| | | | | | UsdAsmCsdA | |
| 89 | TGTGTAAAA | NM_00524 | 2 | −8.8 | mUsdGsmUsdGsmUsd | 473 |
| | CGTTCACTTA | 9.5_1982- | | | AsmAsdAsmAsdCsmG | |
| | C | 2001_as | | | sdTsmUsdCsmAsdCsm | |
| | | | | | UsdTsmAsdC | |
| 90 | GTGTGTAAA | NM_00524 | 2 | −8 | mGsdTsmGsdTsmGsd | 474 |
| | ACGTTCACTT | 9.5_1983- | | | TsmAsdAsmAsdAsmC | |
| | A | 2002_as | | | sdGsmUsdTsmCsdAs | |
| | | | | | mCsdTsmUsdA | |
| 91 | TGTGTGTAA | NM_00524 | 2 | −7 | mUsdGsmUsdGsmUsd | 475 |
| | AACGTTCACT | 9.5_1984- | | | GsmUsdAsmAsdAsm | |
| | T | 2003_as | | | AsdCsmGsdTsmUsdCs | |
| | | | | | mAsdCsmUsdT | |
| 92 | TGCAAATGT | NM_00524 | 2 | −6.9 | mUsdGsmCsdAsmAsd | 476 |
| | GTGTAAAAC | 9.5_1990- | | | AsmUsdGsmUsdGsm | |
| | GT | 2009_as | | | UsdGsmUsdAsmAsdA | |
| | | | | | smAsdCsmGsdT | |
| 93 | ATGCAAATG | NM_00524 | 2 | −6.6 | mAsdTsmGsdCsmAsd | 477 |
| | TGTGTAAAA | 9.5_1991- | | | AsmAsdTsmGsdTsmG | |
| | CG | 2010_as | | | sdTsmGsdTsmAsdAsm | |
| | | | | | AsdAsmCsdG | |
| 94 | AATGCAAAT | NM_00524 | 2 | −8.1 | mAsdAsmUsdGsmCsd | 478 |
| | GTGTGTAAA | 9.5_1992- | | | AsmAsdAsmUsdGsm | |
| | AC | 2011_as | | | UsdGsmUsdGsmUsdA | |
| | | | | | smAsdAsmAsdC | |
| 95 | CAATGCAAA | NM_00524 | 2 | −11 | mCsdAsmAsdTsmGsd | 479 |
| | TGTGTGTAA | 9.5_1993- | | | CsmAsdAsmAsdTsmG | |
| | AA | 2012_as | | | sdTsmGsdTsmGsdTsm | |
| | | | | | AsdAsmAsdA | |
| 96 | TTTACAATGC | NM_00524 | 2 | −15.1 | mUsdTsmUsdAsmCsd | 480 |
| | AAATGTGTG | 9.5_1997- | | | AsmAsdTsmGsdCsmA | |
| | T | 2016_as | | | sdAsmAsdTsmGsdTsm | |
| | | | | | GsdTsmGsdT | |
| 97 | AAATACCTG | NM_00524 | 2 | −10 | mAsdAsmAsdTsmAsd | 481 |
| | GACTTATTTT | 9.5_2027- | | | CsmCsdTsmGsdGsmA | |
| | T | 2046_as | | | sdCsmUsdTsmAsdTsm | |
| | | | | | UsdTsmUsdT | |
| 98 | AAAATACCT | NM_00524 | 2 | −9.4 | mAsdAsmAsdAsmUsd | 482 |
| | GGACTTATTT | 9.5_2028- | | | AsmCsdCsmUsdGsmG | |
| | T | 2047_as | | | sdAsmCsdTsmUsdAs | |
| | | | | | mUsdTsmUsdT | |
| 99 | AAAAATACC | NM_00524 | 2 | −7.9 | mAsdAsmAsdAsmAsd | 483 |
| | TGGACTTATT | 9.5_2029- | | | TsmAsdCsmCsdTsmG | |
| | T | 2048_as | | | sdGsmAsdCsmUsdTs | |
| | | | | | mAsdTsmUsdT | |
| 100 | AACGTACAG | NM_00524 | 2 | −11.2 | mAsdAsmCsdGsmUsd | 484 |
| | AAATGGGAG | 9.5_2061- | | | AsmCsdAsmGsdAsmA | |
| | GG | 2080_as | | | sdAsmUsdGsmGsdGs | |
| | | | | | mAsdGsmGsdG | |
| 101 | AAACGTACA | NM_00524 | 2 | −11.6 | mAsdAsmAsdCsmGsd | 485 |
| | GAAATGGGA | 9.5_2062- | | | TsmAsdCsmAsdGsmA | |
| | GG | 2081_as | | | sdAsmAsdTsmGsdGs | |
| | | | | | mGsdAsmGsdG | |
| 102 | CAAACGTAC | NM_00524 | 2 | −11.1 | mCsdAsmAsdAsmCsd | 486 |
| | AGAAATGGG | 9.5_2063- | | | GsmUsdAsmCsdAsmG | |
| | AG | 2082_as | | | sdAsmAsdAsmUsdGs | |
| | | | | | mGsdGsmAsdG | |
| 103 | ACAAACGTA | NM_00524 | 2 | −9.7 | mAsdCsmAsdAsmAsd | 487 |
| | CAGAAATGG | 9.5_2064- | | | CsmGsdTsmAsdCsmA | |
| | GA | 2083_as | | | sdGsmAsdAsmAsdTs | |
| | | | | | mGsdGsmGsdA | |
| 104 | AACAAACGT | NM_00524 | 2 | −10 | mAsdAsmCsdAsmAsd | 488 |
| | ACAGAAATG | 9.5_2065- | | | AsmCsdGsmUsdAsmC | |
| | GG | 2084_as | | | sdAsmGsdAsmAsdAs | |
| | | | | | mUsdGsmGsdG | |
| 105 | GAACAAACG | NM_00524 | 2 | −6.8 | mGsdAsmAsdCsmAsd | 489 |
| | TACAGAAAT | 9.5_2066- | | | AsmAsdCsmGsdTsmA | |
| | GG | 2085_as | | | sdCsmAsdGsmAsdAs | |
| | | | | | mAsdTsmGsdG | |
| 106 | CACTCCACA | NM_00524 | 2 | −17.2 | mCsdAsmCsdTsmCsd | 490 |
| | CCTTGTTAGA | 9.5_2107- | | | CsmAsdCsmAsdCsmC | |
| | A | 2126_as | | | sdTsmUsdGsmUsdTsm | |
| | | | | | AsdGsmAsdA | |
| 107 | ACACTCCAC | NM_00524 | 2 | −18.1 | mAsdCsmAsdCsmUsd | 491 |
| | ACCTTGTTAG | 9.5_2108- | | | CsmCsdAsmCsdAsmC | |
| | A | 2127_as | | | sdCsmUsdTsmGsdTsm | |
| | | | | | UsdAsmGsdA | |
| 108 | GACACTCCA | NM_00524 | 2 | −18.1 | mGsdAsmCsdAsmCsd | 492 |
| | CACCTTGTTA | 9.5_2109- | | | TsmCsdCsmAsdCsmA | |
| | G | 2128_as | | | sdCsmCsdTsmUsdGsm | |
| | | | | | UsdTsmAsdG | |
| 109 | TCGCTGACA | NM_00524 | 2 | −10.5 | mUsdCsmGsdCsmUsd | 493 |
| | CTCCACACCT | 9.5_2114- | | | GsmAsdCsmAsdCsmU | |
| | T | 2133_as | | | sdCsmCsdAsmCsdAs | |
| | | | | | mCsdCsmUsdT | |
| 110 | GTATTCTCCC | NM_00524 | 2 | −7.2 | mGsdTsmAsdTsmUsd | 49 |
| | CACATTGCA | 9.5_2135- | | | CsmUsdCsmCsdCsmC | |
| | C | 2154_as | | | sdAsmCsdAsmUsdTs | |
| | | | | | mGsdCsmAsdC | |
| 111 | TGTATTCTCC | NM_00524 | 2 | −10 | mUsdGsmUsdAsmUsd | 495 |
| | CCACATTGC | 9.5_2136- | | | TsmCsdTsmCsdCsmCs | |
| | A | 2155_as | | | dCsmAsdCsmAsdTsm | |
| | | | | | UsdGsmCsdA | |
| 112 | ATGTATTCTC | NM_00524 | 2 | −10.5 | mAsdTsmGsdTsmAsd | 496 |
| | CCCACATTGC | 9.5_2137- | | | TsmUsdCsmUsdCsmC | |
| | | 2156_as | | | sdCsmCsdAsmCsdAs | |
| | | | | | mUsdTsmGsdC | |
| 113 | ACAATGTATT | NM_00524 | 2 | −6.3 | mAsdCsmAsdAsmUsd | 497 |
| | CTCCCCACAT | 9.5_2140- | | | GsmUsdAsmUsdTsmC | |
| | | 2159_as | | | sdTsmCsdCsmCsdCsm | |
| | | | | | AsdCsmAsdT | |
| 114 | TTGACTTCCA | NM_00524 | 2 | −8.1 | mUsdTsmGsdAsmCsd | 498 |
| | AACCTTATAT | 9.5_2163- | | | TsmUsdCsmCsdAsmA | |
| | | 2182_as | | | sdAsmCsdCsmUsdTsm | |
| | | | | | AsdTsmAsdT | |
| 115 | TTTGACTTCC | NM_00524 | 2 | −7.2 | mUsdTsmUsdGsmAsd | 499 |
| | AAACCTTAT | 9.5_2164- | | | CsmUsdTsmCsdCsmA | |
| | A | 2183_as | | | sdAsmAsdCsmCsdTsm | |
| | | | | | UsdAsmUsdA | |
| 116 | CTACTATAAT | NM_00524 | 2 | −7.4 | mCsdTsmAsdCsmUsd | 500 |
| | TTGACTTCCA | 9.5_2173- | | | AsmUsdAsmAsdTsmU | |
| | | 2192_as | | | sdTsmGsdAsmCsdTsm | |
| | | | | | UsdCsmCsdA | |
| 117 | TCTACTATAA | NM_00524 | 2 | −8 | mUsdCsmUsdAsmCsd | 501 |
| | TTTGACTTCC | 9.5_2174- | | | TsmAsdTsmAsdAsmU | |
| | | 2193_as | | | sdTsmUsdGsmAsdCs | |
| | | | | | mUsdTsmCsdC | |
| 118 | TTCTACTATA | NM_00524 | 2 | −9 | mUsdTsmCsdTsmAsd | 502 |
| | ATTTGACTTC | 9.5_2175- | | | CsmUsdAsmUsdAsmA | |
| | | 2194_as | | | sdTsmUsdTsmGsdAsm | |
| | | | | | CsdTsmUsdC | |
| 119 | CATTCTACTA | NM_00524 | 2 | −7.9 | mCsdAsmUsdTsmCsd | 503 |
| | TAATTTGACT | 9.5_2177- | | | TsmAsdCsmUsdAsmU | |
| | | 2196_as | | | sdAsmAsdTsmUsdTsm | |
| | | | | | GsdAsmCsdT | |
| 120 | ACATTCTACT | NM_00524 | 2 | −9.9 | mAsdCsmAsdTsmUsd | 504 |
| | ATAATTTGAC | 9.5_2178- | | | CsmUsdAsmCsdTsmA | |
| | | 2197_as | | | sdTsmAsdAsmUsdTsm | |
| | | | | | UsdGsmAsdC | |
| 121 | GATACACAT | NM_00524 | 2 | −10.1 | mGsdAsmUsdAsmCsd | 505 |
| | TCTACTATAA | 9.5_2183- | | | AsmCsdAsmUsdTsmC | |
| | T | 2202_as | | | sdTsmAsdCsmUsdAs | |
| | | | | | mUsdAsmAsdT | |
| 122 | AGATACACA | NM_00524 | 2 | −10.1 | mAsdGsmAsdTsmAsd | 506 |
| | TTCTACTATA | 9.5_2184- | | | CsmAsdCsmAsdTsmU | |
| | A | 2203_as | | | sdCsmUsdAsmCsdTsm | |
| | | | | | AsdTsmAsdA | |
| 123 | TAGATACAC | NM_00524 | 2 | −10.5 | mUsdAsmGsdAsmUsd | 507 |
| | ATTCTACTAT | 9.5_2185- | | | AsmCsdAsmCsdAsmU | |
| | A | 2204_as | | | sdTsmCsdTsmAsdCsm | |
| | | | | | UsdAsmUsdA | |
| 124 | TTAGATACA | NM_00524 | 2 | −10.9 | mUsdTsmAsdGsmAsd | 508 |
| | CATTCTACTA | 9.5_2186- | | | TsmAsdCsmAsdCsmA | |
| | T | 2205_as | | | sdTsmUsdCsmUsdAs | |
| | | | | | mCsdTsmAsdT | |
| 125 | TTTAGATACA | NM_00524 | 2 | −11 | mUsdTsmUsdAsmGsd | 509 |
| | CATTCTACTA | 9.5_2187- | | | AsmUsdAsmCsdAsmC | |
| | | 2206_as | | | sdAsmUsdTsmCsdTsm | |
| | | | | | AsdCsmUsdA | |
| 126 | ATTTAGATAC | NM_00524 | 2 | −11.3 | mAsdTsmUsdTsmAsd | 510 |
| | ACATTCTACT | 9.5_2188- | | | GsmAsdTsmAsdCsmA | |
| | | 2207_as | | | sdCsmAsdTsmUsdCsm | |
| | | | | | UsdAsmCsdT | |
| 127 | TATTTAGATA | NM_00524 | 2 | −6.7 | mUsdAsmUsdTsmUsd | 511 |
| | CACATTCTAC | 9.5_2189- | | | AsmGsdAsmUsdAsmC | |
| | | 2208_as | | | sdAsmCsdAsmUsdTs | |
| | | | | | mCsdTsmAsdC | |
| 128 | CTATTTAGAT | NM_00524 | 2 | −10.2 | mCsdTsmAsdTsmUsd | 512 |
| | ACACATTCTA | 9.5_2190- | | | TsmAsdGsmAsdTsmA | |
| | | 2209_as | | | sdCsmAsdCsmAsdTsm | |
| | | | | | UsdCsmUsdA | |
| 129 | CACTATTTAG | NM_00524 | 2 | −13.6 | mCsdAsmCsdTsmAsd | 513 |
| | ATACACATTC | 9.5_2192- | | | TsmUsdTsmAsdGsmA | |
| | | 2211_as | | | sdTsmAsdCsmAsdCsm | |
| | | | | | AsdTsmUsdC | |
| 130 | GTCACTATTT | NM_00524 | 2 | −14.7 | mGsdTsmCsdAsmCsd | 514 |
| | AGATACACA | 9.5_2194- | | | TsmAsdTsmUsdTsmA | |
| | T | 2213_as | | | sdGsmAsdTsmAsdCs | |
| | | | | | mAsdCsmAsdT | |
| 131 | AGTCACTATT | NM_00524 | 2 | −13.4 | mAsdGsmUsdCsmAsd | 515 |
| | TAGATACAC | 9.5_2195- | | | CsmUsdAsmUsdTsmU | |
| | A | 2214_as | | | sdAsmGsdAsmUsdAs | |
| | | | | | mCsdAsmCsdA | |
| 132 | CAGTCACTAT | NM_00524 | 2 | −11.6 | mCsdAsmGsdTsmCsd | 516 |
| | TTAGATACA | 9.5_2196- | | | AsmCsdTsmAsdTsmU | |
| | C | 2215_as | | | sdTsmAsdGsmAsdTsm | |
| | | | | | AsdCsmAsdC | |
| 133 | AGCAGTCAC | NM_00524 | 2 | −13.1 | mAsdGsmCsdAsmGsd | 517 |
| | TATTTAGATA | 9.5_2198- | | | TsmCsdAsmCsdTsmA | |
| | C | 2217_as | | | sdTsmUsdTsmAsdGsm | |
| | | | | | AsdTsmAsdC | |
| 134 | AAGCAGTCA | NM_00524 | 2 | −12.2 | mAsdAsmGsdCsmAsd | 518 |
| | CTATTTAGAT | 9.5_2199- | | | GsmUsdCsmAsdCsmU | |
| | A | 2218_as | | | sdAsmUsdTsmUsdAs | |
| | | | | | mGsdAsmUsdA | |
| 135 | AAAGCAGTC | NM_00524 | 2 | −11.8 | mAsdAsmAsdGsmCsd | 519 |
| | ACTATTTAGA | 9.5_2200- | | | AsmGsdTsmCsdAsmC | |
| | T | 2219_as | | | sdTsmAsdTsmUsdTsm | |
| | | | | | AsdGsmAsdT | |
| 136 | CAAAGCAGT | NM_00524 | 2 | −12.5 | mCsdAsmAsdAsmGsd | 520 |
| | CACTATTTAG | 9.5_2201- | | | CsmAsdGsmUsdCsmA | |
| | A | 2220_as | | | sdCsmUsdAsmUsdTs | |
| | | | | | mUsdAsmGsdA | |
| 137 | GCAAAGCAG | NM_00524 | 2 | −13.7 | mGsdCsmAsdAsmAsd | 521 |
| | TCACTATTTA | 9.5_2202- | | | GsmCsdAsmGsdTsmC | |
| | G | 2221_as | | | sdAsmCsdTsmAsdTsm | |
| | | | | | UsdTsmAsdG | |
| 138 | GGCAAAGCA | NM_00524 | 2 | −14.9 | mGsdGsmCsdAsmAsd | 522 |
| | GTCACTATTT | 9.5_2203- | | | AsmGsdCsmAsdGsmU | |
| | A | 2222_as | | | sdCsmAsdCsmUsdAs | |
| | | | | | mUsdTsmUsdA | |
| 139 | TGGCAAAGC | NM_00524 | 2 | −15.2 | mUsdGsmGsdCsmAsd | 523 |
| | AGTCACTATT | 9.5_2204- | | | AsmAsdGsmCsdAsmG | |
| | T | 2223_as | | | sdTsmCsdAsmCsdTsm | |
| | | | | | AsdTsmUsdT | |
| 140 | AATGGCAAA | NM_00524 | 2 | −14.3 | mAsdAsmUsdGsmGsd | 524 |
| | GCAGTCACT | 9.5_2206- | | | CsmAsdAsmAsdGsmC | |
| | AT | 2225_as | | | sdAsmGsdTsmCsdAs | |
| | | | | | mCsdTsmAsdT | |
| 141 | AAATGGCAA | NM_00524 | 2 | −10.9 | mAsdAsmAsdTsmGsd | 525 |
| | AGCAGTCAC | 9.5_2207- | | | GsmCsdAsmAsdAsmG | |
| | TA | 2226_as | | | sdCsmAsdGsmUsdCs | |
| | | | | | mAsdCsmUsdA | |
| 142 | GAAATGGCA | NM_00524 | 2 | −13.2 | mGsdAsmAsdAsmUsd | 526 |
| | AAGCAGTCA | 9.5_2208- | | | GsmGsdCsmAsdAsmA | |
| | CT | 2227_as | | | sdGsmCsdAsmGsdTs | |
| | | | | | mCsdAsmCsdT | |
| 143 | AATGAAATG | NM_00524 | 2 | −10.6 | mAsdAsmUsdGsmAsd | 527 |
| | GCAAAGCAG | 9.5_2211- | | | AsmAsdTsmGsdGsmC | |
| | TC | 2230_as | | | sdAsmAsdAsmGsdCs | |
| | | | | | mAsdGsmUsdC | |
| 144 | AGGTTTGAA | NM_00524 | 2 | −6.6 | mAsdGsmGsdTsmUsd | 528 |
| | TGAAATGGC | 9.5_2218- | | | TsmGsdAsmAsdTsmG | |
| | AA | 2237_as | | | sdAsmAsdAsmUsdGs | |
| | | | | | mGsdCsmAsdA | |
| 145 | CAGGTTTGA | NM_00524 | 2 | −8 | mCsdAsmGsdGsmUsd | 529 |
| | ATGAAATGG | 9.5_2219- | | | TsmUsdGsmAsdAsmU | |
| | CA | 2238_as | | | sdGsmAsdAsmAsdTs | |
| | | | | | mGsdGsmCsdA | |
| 146 | TCAGGTTTGA | NM_00524 | 2 | −7.2 | mUsdCsmAsdGsmGsd | 530 |
| | ATGAAATGG | 9.5_2220- | | | TsmUsdTsmGsdAsmA | |
| | C | 2239_as | | | sdTsmGsdAsmAsdAs | |
| | | | | | mUsdGsmGsdC | |
| 147 | GTCAGGTTTG | NM_00524 | 2 | −6.4 | mGsdTsmCsdAsmGsd | 531 |
| | AATGAAATG | 9.5_2221- | | | GsmUsdTsmUsdGsmA | |
| | G | 2240_as | | | sdAsmUsdGsmAsdAs | |
| | | | | | mAsdTsmGsdG | |
| 148 | CTTGTCAGGT | NM_00524 | 2 | −6.2 | mCsdTsmUsdGsmUsd | 532 |
| | TTGAATGAA | 9.5_2224- | | | CsmAsdGsmGsdTsmU | |
| | A | 2243_as | | | sdTsmGsdAsmAsdTsm | |
| | | | | | GsdAsmAsdA | |
| 149 | CTTAGAGAT | NM_00524 | 2 | −7.7 | mCsdTsmUsdAsmGsd | 533 |
| | AGACTTGTC | 9.5_2236- | | | AsmGsdAsmUsdAsm | |
| | AG | 2255_as | | | GsdAsmCsdTsmUsdGs | |
| | | | | | mUsdCsmAsdG | |
| 150 | TCTTAGAGAT | NM_00524 | 2 | −11.7 | mUsdCsmUsdTsmAsd | 534 |
| | AGACTTGTC | 9.5_2237- | | | GsmAsdGsmAsdTsmA | |
| | A | 2256_as | | | sdGsmAsdCsmUsdTs | |
| | | | | | mGsdTsmCsdA | |
| 151 | CTCTTAGAG | NM_00524 | 2 | −13.4 | mCsdTsmCsdTsmUsd | 535 |
| | ATAGACTTGT | 9.5_2238- | | | AsmGsdAsmGsdAsm | |
| | C | 2257_as | | | UsdAsmGsdAsmCsdTs | |
| | | | | | mUsdGsmUsdC | |
| 152 | GCTCTTAGA | NM_00524 | 2 | −11.7 | mGsdCsmUsdCsmUsd | 536 |
| | GATAGACTT | 9.5_2239- | | | TsmAsdGsmAsdGsmA | |
| | GT | 2258_as | | | sdTsmAsdGsmAsdCs | |
| | | | | | mUsdTsmGsdT | |
| 153 | GGCTCTTAG | NM_00524 | 2 | −9 | mGsdGsmCsdTsmCsd | 537 |
| | AGATAGACT | 9.5_2240- | | | TsmUsdAsmGsdAsmG | |
| | TG | 2259_as | | | sdAsmUsdAsmGsdAs | |
| | | | | | mCsdTsmUsdG | |
| 154 | CGGCTCTTAG | NM_00524 | 3 | −8.1 | mCsdGsmGsdCsmUsd | 538 |
| | AGATAGACT | 9.5_2241- | | | CsmUsdTsmAsdGsmA | |
| | T | 2260_as | | | sdGsmAsdTsmAsdGs | |
| | | | | | mAsdCsmUsdT | |
| 155 | GCGGCTCTTA | NM_00524 | 3 | −6.8 | mGsdCsmGsdGsmCsd | 539 |
| | GAGATAGAC | 9.5_2242- | | | TsmCsdTsmUsdAsmG | |
| | T | 2261_as | | | sdAsmGsdAsmUsdAs | |
| | | | | | mGsdAsmCsdT | |
| 156 | TGGCGGCTCT | NM_00524 | 2 | −7.2 | mUsdGsmGsdCsmGsd | 540 |
| | TAGAGATAG | 9.5_2244- | | | GsmCsdTsmCsdTsmU | |
| | A | 2263_as | | | sdAsmGsdAsmGsdAs | |
| | | | | | mUsdAsmGsdA | |
| 157 | TCTGGCGGCT | NM_00524 | 2 | −8.4 | mUsdCsmUsdGsmGsd | 541 |
| | CTTAGAGAT | 9.5_2246- | | | CsmGsdGsmCsdTsmC | |
| | A | 2265_as | | | sdTsmUsdAsmGsdAs | |
| | | | | | mGsdAsmUsdA | |
| 158 | ATCTGGCGG | NM_00524 | 2 | −10 | mAsdTsmCsdTsmGsd | 542 |
| | CTCTTAGAG | 9.5_2247- | | | GsmCsdGsmGsdCsmU | |
| | AT | 2266_as | | | sdCsmUsdTsmAsdGs | |
| | | | | | mAsdGsmAsdT | |
| 159 | AATCTGGCG | NM_00524 | 2 | −9.8 | mAsdAsmUsdCsmUsd | 543 |
| | GCTCTTAGA | 9.5_2248- | | | GsmGsdCsmGsdGsmC | |
| | GA | 2267_as | | | sdTsmCsdTsmUsdAsm | |
| | | | | | GsdAsmGsdA | |
| 160 | TACTGCACA | NM_00524 | 2 | −8.1 | mUsdAsmCsdTsmGsd | 544 |
| | CATGGAAAT | 9.5_2263- | | | CsmAsdCsmAsdCsmA | |
| | CT | 2282_as | | | sdTsmGsdGsmAsdAs | |
| | | | | | mAsdTsmCsdT | |
| 161 | ATACTGCAC | NM_00524 | 2 | −9.1 | mAsdTsmAsdCsmUsd | 545 |
| | ACATGGAAA | 9.5_2264- | | | GsmCsdAsmCsdAsmC | |
| | TC | 2283_as | | | sdAsmUsdGsmGsdAs | |
| | | | | | mAsdAsmUsdC | |
| 162 | AATACTGCA | NM_00524 | 2 | −8 | mAsdAsmUsdAsmCsd | 546 |
| | CACATGGAA | 9.5_2265- | | | TsmGsdCsmAsdCsmA | |
| | AT | 2284_as | | | sdCsmAsdTsmGsdGs | |
| | | | | | mAsdAsmAsdT | |
| 163 | ATAATACTG | NM_00524 | 2 | −8.4 | mAsdTsmAsdAsmUsd | 547 |
| | CACACATGG | 9.5_2267- | | | AsmCsdTsmGsdCsmA | |
| | AA | 2286_as | | | sdCsmAsdCsmAsdTsm | |
| | | | | | GsdGsmAsdA | |
| 164 | CTTATAATAC | NM_00524 | 2 | −7.6 | mCsdTsmUsdAsmUsd | 548 |
| | TGCACACAT | 9.5_2270- | | | AsmAsdTsmAsdCsmU | |
| | G | 2289_as | | | sdGsmCsdAsmCsdAs | |
| | | | | | mCsdAsmUsdG | |
| 165 | AACTTATAAT | NM_00524 | 2 | −11.8 | mAsdAsmCsdTsmUsd | 549 |
| | ACTGCACAC | 9.5_2272- | | | AsmUsdAsmAsdTsmA | |
| | A | 2291_as | | | sdCsmUsdGsmCsdAs | |
| | | | | | mCsdAsmCsdA | |
| 166 | TAACTTATAA | NM_00524 | 3 | −12.2 | mUsdAsmAsdCsmUsd | 550 |
| | TACTGCACA | 9.5_2273- | | | TsmAsdTsmAsdAsmU | |
| | C | 2292_as | | | sdAsmCsdTsmGsdCsm | |
| | | | | | AsdCsmAsdC | |
| 167 | ATAACTTATA | NM_00524 | 2 | −15.5 | mAsdTsmAsdAsmCsd | 551 |
| | ATACTGCAC | 9.5_2274- | | | TsmUsdAsmUsdAsmA | |
| | A | 2293_as | | | sdTsmAsdCsmUsdGs | |
| | | | | | mCsdAsmCsdA | |
| 168 | GATAACTTAT | NM_00524 | 2 | −11.9 | mGsdAsmUsdAsmAsd | 552 |
| | AATACTGCA | 9.5_2275- | | | CsmUsdTsmAsdTsmA | |
| | C | 2294_as | | | sdAsmUsdAsmCsdTs | |
| | | | | | mGsdCsmAsdC | |
| 169 | TGATAACTTA | NM_00524 | 2 | −10.3 | mUsdGsmAsdTsmAsd | 553 |
| | TAATACTGC | 9.5_2276- | | | AsmCsdTsmUsdAsmU | |
| | A | 2295_as | | | sdAsmAsdTsmAsdCs | |
| | | | | | mUsdGsmCsdA | |
| 170 | ATGATAACTT | NM_00524 | 2 | −8.8 | mAsdTsmGsdAsmUsd | 554 |
| | ATAATACTG | 9.5_2277- | | | AsmAsdCsmUsdTsmA | |
| | C | 2296_as | | | sdTsmAsdAsmUsdAs | |
| | | | | | mCsdTsmGsdC | |
| 171 | GTTCCATGAT | NM_00524 | 2 | −7.1 | mGsdTsmUsdCsmCsd | 555 |
| | AACTTATAAT | 9.5_2282- | | | AsmUsdGsmAsdTsmA | |
| | | 2301_as | | | sdAsmCsdTsmUsdAs | |
| | | | | | mUsdAsmAsdT | |
| 172 | AGTTCCATG | NM_00524 | 2 | −6.6 | mAsdGsmUsdTsmCsd | 556 |
| | ATAACTTATA | 9.5_2283- | | | CsmAsdTsmGsdAsmU | |
| | A | 2302_as | | | sdAsmAsdCsmUsdTs | |
| | | | | | mAsdTsmAsdA | |
| 173 | TAGTTCCATG | NM_00524 | 2 | −6.9 | mUsdAsmGsdTsmUsd | 557 |
| | ATAACTTATA | 9.5_2284- | | | CsmCsdAsmUsdGsmA | |
| | | 2303_as | | | sdTsmAsdAsmCsdTsm | |
| | | | | | UsdAsmUsdA | |
| 174 | ATAGTTCCAT | NM_00524 | 2 | −7.2 | mAsdTsmAsdGsmUsd | 558 |
| | GATAACTTAT | 9.5_2285- | | | TsmCsdCsmAsdTsmG | |
| | | 2304_as | | | sdAsmUsdAsmAsdCs | |
| | | | | | mUsdTsmAsdT | |
| 175 | TATAGTTCCA | NM_00524 | 2 | −6.9 | mUsdAsmUsdAsmGsd | 559 |
| | TGATAACTTA | 9.5_2286- | | | TsmUsdCsmCsdAsmU | |
| | | 2305_as | | | sdGsmAsdTsmAsdAs | |
| | | | | | mCsdTsmUsdA | |
| 176 | TCTGCGTCCA | NM_00524 | 2 | −8.1 | mUsdCsmUsdGsmCsd | 560 |
| | CCATATAGTT | 9.5_2299- | | | GsmUsdCsmCsdAsmC | |
| | | 2318_as | | | sdCsmAsdTsmAsdTsm | |
| | | | | | AsdGsmUsdT | |
| 177 | GTCTGCGTCC | NM_00524 | 2 | −10.6 | mGsdTsmCsdTsmGsd | 561 |
| | ACCATATAG | 9.5_2300- | | | CsmGsdTsmCsdCsmA | |
| | T | 2319_as | | | sdCsmCsdAsmUsdAs | |
| | | | | | mUsdAsmGsdT | |
| 178 | GGTCTGCGTC | NM_00524 | 3 | −10.7 | mGsdGsmUsdCsmUsd | 562 |
| | CACCATATA | 9.5_2301- | | | GsmCsdGsmUsdCsmC | |
| | G | 2320_as | | | sdAsmCsdCsmAsdTsm | |
| | | | | | AsdTsmAsdG | |
| 179 | AGGTCTGCG | NM_00524 | 3 | −9.5 | mAsdGsmGsdTsmCsd | 563 |
| | TCCACCATAT | 9.5_2302- | | | TsmGsdCsmGsdTsmC | |
| | A | 2321_as | | | sdCsmAsdCsmCsdAs | |
| | | | | | mUsdAsmUsdA | |
| 180 | AAGGTCTGC | NM_00524 | 2 | −8.9 | mAsdAsmGsdGsmUsd | 564 |
| | GTCCACCAT | 9.5_2303- | | | CsmUsdGsmCsdGsmU | |
| | AT | 2322_as | | | sdCsmCsdAsmCsdCsm | |
| | | | | | AsdTsmAsdT | |
| 181 | TTCTCAAGGT | NM_00524 | 2 | −12.1 | mUsdTsmCsdTsmCsd | 565 |
| | CTGCGTCCAC | 9.5_2308- | | | AsmAsdGsmGsdTsmC | |
| | | 2327_as | | | sdTsmGsdCsmGsdTsm | |
| | | | | | CsdCsmAsdC | |
| 182 | GTTCTCAAG | NM_00524 | 2 | −16.1 | mGsdTsmUsdCsmUsd | 566 |
| | GTCTGCGTCC | 9.5_2309- | | | CsmAsdAsmGsdGsmU | |
| | A | 2328_as | | | sdCsmUsdGsmCsdGs | |
| | | | | | mUsdCsmCsdA | |
| 183 | TGTTCTCAAG | NM_00524 | 2 | −17.1 | mUsdGsmUsdTsmCsd | 567 |
| | GTCTGCGTCC | 9.5_2310- | | | TsmCsdAsmAsdGsmG | |
| | | 2329_as | | | sdTsmCsdTsmGsdCsm | |
| | | | | | GsdTsmCsdC | |
| 184 | TTGTTCTCAA | NM_00524 | 3 | −18.5 | mUsdTsmGsdTsmUsd | 568 |
| | GGTCTGCGTC | 9.5_2311- | | | CsmUsdCsmAsdAsmG | |
| | | 2330_as | | | sdGsmUsdCsmUsdGs | |
| | | | | | mCsdGsmUsdC | |
| 185 | GTTGTTCTCA | NM_00524 | 3 | −21.9 | mGsdTsmUsdGsmUsd | 569 |
| | AGGTCTGCG | 9.5_2312- | | | TsmCsdTsmCsdAsmA | |
| | T | 2331_as | | | sdGsmGsdTsmCsdTsm | |
| | | | | | GsdCsmGsdT | |
| 186 | GGTTGTTCTC | NM_00524 | 3 | −21.9 | mGsdGsmUsdTsmGsd | 570 |
| | AAGGTCTGC | 9.5_2313- | | | TsmUsdCsmUsdCsmA | |
| | G | 2332_as | | | sdAsmGsdGsmUsdCs | |
| | | | | | mUsdGsmCsdG | |
| 187 | AGGTTGTTCT | NM_00524 | 2 | −20 | mAsdGsmGsdTsmUsd | 571 |
| | CAAGGTCTG | 9.5_2314- | | | GsmUsdTsmCsdTsmC | |
| | C | 2333_as | | | sdAsmAsdGsmGsdTs | |
| | | | | | mCsdTsmGsdC | |
| 188 | TAGGTTGTTC | NM_00524 | 2 | −16.9 | mUsdAsmGsdGsmUsd | 572 |
| | TCAAGGTCT | 9.5_2315- | | | TsmGsdTsmUsdCsmU | |
| | G | 2334_as | | | sdCsmAsdAsmGsdGs | |
| | | | | | mUsdCsmUsdG | |
| 189 | TTAGGTTGTT | NM_00524 | 2 | −9.3 | mUsdTsmAsdGsmGsd | 573 |
| | CTCAAGGTCT | 9.5_2316- | | | TsmUsdGsmUsdTsmC | |
| | | 2335_as | | | sdTsmCsdAsmAsdGs | |
| | | | | | mGsdTsmCsdT | |
| 190 | TTTAGGTTGT | NM_00524 | 2 | −8.2 | mUsdTsmUsdAsmGsd | 574 |
| | TCTCAAGGTC | 9.5_2317- | | | GsmUsdTsmGsdTsmU | |
| | | 2336_as | | | sdCsmUsdCsmAsdAs | |
| | | | | | mGsdGsmUsdC | |
| 191 | AATTTAGGTT | NM_00524 | 2 | −6.8 | mAsdAsmUsdTsmUsd | 575 |
| | GTTCTCAAG | 9.5_2319- | | | AsmGsdGsmUsdTsmG | |
| | G | 2338_as | | | sdTsmUsdCsmUsdCsm | |
| | | | | | AsdAsmGsdG | |
| 192 | CCCATAATTT | NM_00524 | 2 | −9.9 | mCsdCsmCsdAsmUsd | 576 |
| | AGGTTGTTCT | 9.5_2324- | | | AsmAsdTsmUsdTsmA | |
| | | 2343_as | | | sdGsmGsdTsmUsdGs | |
| | | | | | mUsdTsmCsdT | |
| 193 | CCCCATAATT | NM_00524 | 2 | −12.4 | mCsdCsmCsdCsmAsd | 577 |
| | TAGGTTGTTC | 9.5_2325- | | | TsmAsdAsmUsdTsmU | |
| | | 2344_as | | | sdAsmGsdGsmUsdTs | |
| | | | | | mGsdTsmUsdC | |
| 194 | TCCCCATAAT | NM_00524 | 2 | −15.6 | mUsdCsmCsdCsmCsd | 578 |
| | TTAGGTTGTT | 9.5_2326- | | | AsmUsdAsmAsdTsmU | |
| | | 2345_as | | | sdTsmAsdGsmGsdTsm | |
| | | | | | UsdGsmUsdT | |
| 195 | CTCCCCATAA | NM_00524 | 2 | −16.4 | mCsdTsmCsdCsmCsd | 579 |
| | TTTAGGTTGT | 9.5_2327- | | | CsmAsdTsmAsdAsmU | |
| | | 2346_as | | | sdTsmUsdAsmGsdGs | |
| | | | | | mUsdTsmGsdT | |
| 196 | TCTCCCCATA | NM_00524 | 2 | −14.2 | mUsdCsmUsdCsmCsd | 580 |
| | ATTTAGGTTG | 9.5_2328- | | | CsmCsdAsmUsdAsmA | |
| | | 2347_as | | | sdTsmUsdTsmAsdGsm | |
| | | | | | GsdTsmUsdG | |
| 197 | AAATTCTCCC | NM_00524 | 2 | −11.9 | mAsdAsmAsdTsmUsd | 581 |
| | CATAATTTAG | 9.5_2332- | | | CsmUsdCsmCsdCsmC | |
| | | 2351_as | | | sdAsmUsdAsmAsdTs | |
| | | | | | mUsdTsmAsdG | |
| 198 | CAATAAATG | NM_00524 | 2 | −6 | mCsdAsmAsdTsmAsd | 582 |
| | GCCAAAATA | 9.5_2410- | | | AsmAsdTsmGsdGsmC | |
| | AT | 2429_as | | | sdCsmAsdAsmAsdAs | |
| | | | | | mUsdAsmAsdT | |
| 199 | TCTTTGGTCT | NM_00524 | 2 | −7.2 | mUsdCsmUsdTsmUsd | 583 |
| | AAAAGTAAA | 9.5_2469- | | | GsmGsdTsmCsdTsmA | |
| | C | 2488_as | | | sdAsmAsdAsmGsdTs | |
| | | | | | mAsdAsmAsdC | |
| 200 | ATCTTTGGTC | NM_00524 | 2 | −5.9 | mAsdTsmCsdTsmUsd | 584 |
| | TAAAAGTAA | 9.5_2470- | | | TsmGsdGsmUsdCsmU | |
| | A | 2489_as | | | sdAsmAsdAsmAsdGs | |
| | | | | | mUsdAsmAsdA | |
| 201 | AATCTTTGGT | NM_00524 | 2 | −7.5 | mAsdAsmUsdCsmUsd | 585 |
| | CTAAAAGTA | 9.5_2471- | | | TsmUsdGsmGsdTsmC | |
| | A | 2490_as | | | sdTsmAsdAsmAsdAs | |
| | | | | | mGsdTsmAsdA | |
| 202 | CAATCTTTGG | NM_00524 | 2 | −9.8 | mCsdAsmAsdTsmCsd | 586 |
| | TCTAAAAGT | 9.5_2472- | | | TsmUsdTsmGsdGsmU | |
| | A | 2491_as | | | sdCsmUsdAsmAsdAs | |
| | | | | | mAsdGsmUsdA | |
| 203 | TTTCTAGAAC | NM_00524 | 2 | −14.7 | mUsdTsmUsdCsmUsd | 587 |
| | CCAATCTTTG | 9.5_2483- | | | AsmGsdAsmAsdCsmC | |
| | | 2502_as | | | sdCsmAsdAsmUsdCs | |
| | | | | | mUsdTsmUsdG | |
| 204 | CATTTTCTAG | NM_00524 | 2 | −15.3 | mCsdAsmUsdTsmUsd | 588 |
| | AACCCAATC | 9.5_2486- | | | TsmCsdTsmAsdGsmA | |
| | T | 2505_as | | | sdAsmCsdCsmCsdAs | |
| | | | | | mAsdTsmCsdT | |
| 205 | GCATTTTCTA | NM_00524 | 2 | −16.2 | mGsdCsmAsdTsmUsd | 589 |
| | GAACCCAAT | 9.5_2487- | | | TsmUsdCsmUsdAsmG | |
| | C | 2506_as | | | sdAsmAsdCsmCsdCs | |
| | | | | | mAsdAsmUsdC | |
| 206 | TGCATTTTCT | NM_00524 | 2 | −14.2 | mUsdGsmCsdAsmUsd | 590 |
| | AGAACCCAA | 9.5_2488- | | | TsmUsdTsmCsdTsmA | |
| | T | 2507_as | | | sdGsmAsdAsmCsdCs | |
| | | | | | mCsdAsmAsdT | |
| 207 | GTGCATTTTC | NM_00524 | 2 | −12.6 | mGsdTsmGsdCsmAsd | 591 |
| | TAGAACCCA | 9.5_2489- | | | TsmUsdTsmUsdCsmU | |
| | A | 2508_as | | | sdAsmGsdAsmAsdCs | |
| | | | | | mCsdCsmAsdA | |
| 208 | AGTGCATTTT | NM_00524 | 2 | −12.3 | mAsdGsmUsdGsmCsd | 592 |
| | CTAGAACCC | 9.5_2490- | | | AsmUsdTsmUsdTsmC | |
| | A | 2509_as | | | sdTsmAsdGsmAsdAs | |
| | | | | | mCsdCsmCsdA | |
| 209 | CAAGTGCAT | NM_00524 | 2 | −7.2 | mCsdAsmAsdGsmUsd | 593 |
| | TTTCTAGAAC | 9.5_2492- | | | GsmCsdAsmUsdTsmU | |
| | C | 2511_as | | | sdTsmCsdTsmAsdGsm | |
| | | | | | AsdAsmCsdC | |
| 210 | CCAAGTGCA | NM_00524 | 2 | −7.6 | mCsdCsmAsdAsmGsd | 59 |
| | TTTTCTAGAA | 9.5_2493- | | | TsmGsdCsmAsdTsmU | |
| | C | 2512_as | | | sdTsmUsdCsmUsdAs | |
| | | | | | mGsdAsmAsdC | |
| 211 | ACCAAGTGC | NM_00524 | 2 | −11 | mAsdCsmCsdAsmAsd | 595 |
| | ATTTTCTAGA | 9.5_2494- | | | GsmUsdGsmCsdAsmU | |
| | A | 2513_as | | | sdTsmUsdTsmCsdTsm | |
| | | | | | AsdGsmAsdA | |
| 212 | TACCAAGTG | NM_00524 | 2 | −11.4 | mUsdAsmCsdCsmAsd | 596 |
| | CATTTTCTAG | 9.5_2495- | | | AsmGsdTsmGsdCsmA | |
| | A | 2514_as | | | sdTsmUsdTsmUsdCsm | |
| | | | | | UsdAsmGsdA | |
| 213 | ATACCAAGT | NM_00524 | 2 | −9 | mAsdTsmAsdCsmCsd | 597 |
| | GCATTTTCTA | 9.5_2496- | | | AsmAsdGsmUsdGsmC | |
| | G | 2515_as | | | sdAsmUsdTsmUsdTsm | |
| | | | | | CsdTsmAsdG | |
| 214 | TATACCAAG | NM_00524 | 2 | −11.8 | mUsdAsmUsdAsmCsd | 598 |
| | TGCATTTTCT | 9.5_2497- | | | CsmAsdAsmGsdTsmG | |
| | A | 2516_as | | | sdCsmAsdTsmUsdTsm | |
| | | | | | UsdCsmUsdA | |
| 215 | GTATACCAA | NM_00524 | 2 | −14.8 | mGsdTsmAsdTsmAsd | 599 |
| | GTGCATTTTC | 9.5_2498- | | | CsmCsdAsmAsdGsmU | |
| | T | 2517_as | | | sdGsmCsdAsmUsdTs | |
| | | | | | mUsdTsmCsdT | |
| 216 | AGTATACCA | NM_00524 | 2 | −15.2 | mAsdGsmUsdAsmUsd | 600 |
| | AGTGCATTTT | 9.5_2499- | | | AsmCsdCsmAsdAsmG | |
| | C | 2518_as | | | sdTsmGsdCsmAsdTsm | |
| | | | | | UsdTsmUsdC | |
| 217 | TAGTATACC | NM_00524 | 2 | −15.2 | mUsdAsmGsdTsmAsd | 601 |
| | AAGTGCATTT | 9.5_2500- | | | TsmAsdCsmCsdAsmA | |
| | T | 2519_as | | | sdGsmUsdGsmCsdAs | |
| | | | | | mUsdTsmUsdT | |
| 218 | TTAGTATACC | NM_00524 | 2 | −16.5 | mUsdTsmAsdGsmUsd | 602 |
| | AAGTGCATTT | 9.5_2501- | | | AsmUsdAsmCsdCsmA | |
| | | 2520_as | | | sdAsmGsdTsmGsdCs | |
| | | | | | mAsdTsmUsdT | |
| 219 | ACTTAGTATA | NM_00524 | 3 | −17.8 | mAsdCsmUsdTsmAsd | 603 |
| | CCAAGTGCA | 9.5_2503- | | | GsmUsdAsmUsdAsmC | |
| | T | 2522_as | | | sdCsmAsdAsmGsdTs | |
| | | | | | mGsdCsmAsdT | |
| 220 | TACTTAGTAT | NM_00524 | 3 | −17.3 | mUsdAsmCsdTsmUsd | 604 |
| | ACCAAGTGC | 9.5_2504- | | | AsmGsdTsmAsdTsmA | |
| | A | 2523_as | | | sdCsmCsdAsmAsdGs | |
| | | | | | mUsdGsmCsdA | |
| 221 | ATACTTAGTA | NM_00524 | 2 | −16.6 | mAsdTsmAsdCsmUsd | 605 |
| | TACCAAGTG | 9.5_2505- | | | TsmAsdGsmUsdAsmU | |
| | C | 2524_as | | | sdAsmCsdCsmAsdAs | |
| | | | | | mGsdTsmGsdC | |
| 222 | AATACTTAGT | NM_00524 | 2 | −14.1 | mAsdAsmUsdAsmCsd | 606 |
| | ATACCAAGT | 9.5_2506- | | | TsmUsdAsmGsdTsmA | |
| | G | 2525_as | | | sdTsmAsdCsmCsdAsm | |
| | | | | | AsdGsmUsdG | |
| 223 | GTTTTAATAC | NM_00524 | 2 | −14.4 | mGsdTsmUsdTsmUsd | 607 |
| | TTAGTATACC | 9.5_2511- | | | AsmAsdTsmAsdCsmU | |
| | | 2530_as | | | sdTsmAsdGsmUsdAs | |
| | | | | | mUsdAsmCsdC | |
| 224 | AGTGTTGCC | NM_00524 | 2 | −8.2 | mAsdGsmUsdGsmUsd | 608 |
| | AACTGAAAC | 9.5_2546- | | | TsmGsdCsmCsdAsmA | |
| | AA | 2565_as | | | sdCsmUsdGsmAsdAs | |
| | | | | | mAsdCsmAsdA | |
| 225 | CAATTGAAT | NM_00524 | 2 | −13.6 | mCsdAsmAsdTsmUsd | 609 |
| | GGGCAGTGT | 9.5_2559- | | | GsmAsdAsmUsdGsm | |
| | TG | 2578_as | | | GsdGsmCsdAsmGsdTs | |
| | | | | | mGsdTsmUsdG | |
| 226 | TCAATTGAAT | NM_00524 | 2 | −13.5 | mUsdCsmAsdAsmUsd | 610 |
| | GGGCAGTGT | 9.5_2560- | | | TsmGsdAsmAsdTsmG | |
| | T | 2579_as | | | sdGsmGsdCsmAsdGs | |
| | | | | | mUsdGsmUsdT | |
| 227 | TTCAATTGAA | NM_00524 | 2 | −13 | mUsdTsmCsdAsmAsd | 611 |
| | TGGGCAGTG | 9.5_2561- | | | TsmUsdGsmAsdAsmU | |
| | T | 2580_as | | | sdGsmGsdGsmCsdAs | |
| | | | | | mGsdTsmGsdT | |
| 228 | TGAAGGCAA | NM_00524 | 2 | −7.3 | mUsdGsmAsdAsmGsd | 612 |
| | TCGTTAATTT | 9.5_2593- | | | GsmCsdAsmAsdTsmC | |
| | T | 2612_as | | | sdGsmUsdTsmAsdAs | |
| | | | | | mUsdTsmUsdT | |
| 229 | CTGAAGGCA | NM_00524 | 2 | −9 | mCsdTsmGsdAsmAsd | 613 |
| | ATCGTTAATT | 9.5_2594- | | | GsmGsdCsmAsdAsmU | |
| | T | 2613_as | | | sdCsmGsdTsmUsdAs | |
| | | | | | mAsdTsmUsdT | |
| 230 | ACTGAAGGC | NM_00524 | 3 | −10 | mAsdCsmUsdGsmAsd | 614 |
| | AATCGTTAAT | 9.5_2595- | | | AsmGsdGsmCsdAsmA | |
| | T | 2614_as | | | sdTsmCsdGsmUsdTsm | |
| | | | | | AsdAsmUsdT | |
| 231 | AACTGAAGG | NM_00524 | 2 | −10.2 | mAsdAsmCsdTsmGsd | 615 |
| | CAATCGTTA | 9.5_2596- | | | AsmAsdGsmGsdCsmA | |
| | AT | 2615_as | | | sdAsmUsdCsmGsdTs | |
| | | | | | mUsdAsmAsdT | |
| 232 | AAACTGAAG | NM_00524 | 2 | −8.9 | mAsdAsmAsdCsmUsd | 616 |
| | GCAATCGTT | 9.5_2597- | | | GsmAsdAsmGsdGsmC | |
| | AA | 2616_as | | | sdAsmAsdTsmCsdGs | |
| | | | | | mUsdTsmAsdA | |
| 233 | CAAACTGAA | NM_00524 | 2 | −7.8 | mCsdAsmAsdAsmCsd | 617 |
| | GGCAATCGT | 9.5_2598- | | | TsmGsdAsmAsdGsmG | |
| | TA | 2617_as | | | sdCsmAsdAsmUsdCs | |
| | | | | | mGsdTsmUsdA | |
| 234 | ACAAACTGA | NM_00524 | 2 | −8.2 | mAsdCsmAsdAsmAsd | 618 |
| | AGGCAATCG | 9.5_2599- | | | CsmUsdGsmAsdAsmG | |
| | TT | 2618_as | | | sdGsmCsdAsmAsdTs | |
| | | | | | mCsdGsmUsdT | |
| 235 | ACACAAACT | NM_00524 | 2 | −7.2 | mAsdCsmAsdCsmAsd | 619 |
| | GAAGGCAAT | 9.5_2601- | | | AsmAsdCsmUsdGsmA | |
| | CG | 2620_as | | | sdAsmGsdGsmCsdAs | |
| | | | | | mAsdTsmCsdG | |
| 236 | GTGACCACA | NM_00524 | 2 | −6.9 | mGsdTsmGsdAsmCsd | 620 |
| | TACATCAAA | 9.5_2628- | | | CsmAsdCsmAsdTsmA | |
| | AT | 2647_as | | | sdCsmAsdTsmCsdAsm | |
| | | | | | AsdAsmAsdT | |
| 237 | TTAGTGACC | NM_00524 | 2 | −5.9 | mUsdTsmAsdGsmUsd | 621 |
| | ACATACATC | 9.5_2631- | | | GsmAsdCsmCsdAsmC | |
| | AA | 2650_as | | | sdAsmUsdAsmCsdAs | |
| | | | | | mUsdCsmAsdA | |
| 238 | TTTACCTATA | NM_00524 | 2 | −7.2 | mUsdTsmUsdAsmCsd | 622 |
| | AGTACAATA | 9.5_2694- | | | CsmUsdAsmUsdAsmA | |
| | G | 2713_as | | | sdGsmUsdAsmCsdAs | |
| | | | | | mAsdTsmAsdG | |
| 239 | GTTTACCTAT | NM_00524 | 2 | −8.4 | mGsdTsmUsdTsmAsd | 623 |
| | AAGTACAAT | 9.5_2695- | | | CsmCsdTsmAsdTsmA | |
| | A | 2714_as | | | sdAsmGsdTsmAsdCs | |
| | | | | | mAsdAsmUsdA | |
| 240 | GGTTTACCTA | NM_00524 | 2 | −9.9 | mGsdGsmUsdTsmUsd | 624 |
| | TAAGTACAA | 9.5_2696- | | | AsmCsdCsmUsdAsmU | |
| | T | 2715_as | | | sdAsmAsdGsmUsdAs | |
| | | | | | mCsdAsmAsdT | |
| 241 | ACATATTTGC | NM_00524 | 2 | −6.7 | mAsdCsmAsdTsmAsd | 625 |
| | AAGGTTTAC | 9.5_2708- | | | TsmUsdTsmGsdCsmA | |
| | C | 2727_as | | | sdAsmGsdGsmUsdTs | |
| | | | | | mUsdAsmCsdC | |
| 242 | TACATATTTG | NM_00524 | 2 | −7.6 | mUsdAsmCsdAsmUsd | 626 |
| | CAAGGTTTA | 9.5_2709- | | | AsmUsdTsmUsdGsmC | |
| | C | 2728_as | | | sdAsmAsdGsmGsdTs | |
| | | | | | mUsdTsmAsdC | |
| 243 | TTACATATTT | NM_00524 | 2 | −10.4 | mUsdTsmAsdCsmAsd | 627 |
| | GCAAGGTTT | 9.5_2710- | | | TsmAsdTsmUsdTsmG | |
| | A | 2729_as | | | sdCsmAsdAsmGsdGs | |
| | | | | | mUsdTsmUsdA | |
| 244 | GTTACATATT | NM_00524 | 2 | −13.4 | mGsdTsmUsdAsmCsd | 628 |
| | TGCAAGGTTT | 9.5_2711- | | | AsmUsdAsmUsdTsmU | |
| | | 2730_as | | | sdGsmCsdAsmAsdGs | |
| | | | | | mGsdTsmUsdT | |
| 245 | GGTTACATAT | NM_00524 | 2 | −14.1 | mGsdGsmUsdTsmAsd | 629 |
| | TTGCAAGGTT | 9.5_2712- | | | CsmAsdTsmAsdTsmU | |
| | | 2731_as | | | sdTsmGsdCsmAsdAs | |
| | | | | | mGsdGsmUsdT | |
| 246 | AGGTTACAT | NM_00524 | 2 | −13 | mAsdGsmGsdTsmUsd | 630 |
| | ATTTGCAAG | 9.5_2713- | | | AsmCsdAsmUsdAsmU | |
| | GT | 2732_as | | | sdTsmUsdGsmCsdAs | |
| | | | | | mAsdGsmGsdT | |
| 247 | CAGGTTACA | NM_00524 | 2 | −8.7 | mCsdAsmGsdGsmUsd | 631 |
| | TATTTGCAAG | 9.5_2714- | | | TsmAsdCsmAsdTsmA | |
| | G | 2733_as | | | sdTsmUsdTsmGsdCsm | |
| | | | | | AsdAsmGsdG | |
| 248 | ACAGGTTAC | NM_00524 | 2 | −7.1 | mAsdCsmAsdGsmGsd | 632 |
| | ATATTTGCAA | 9.5_2715- | | | TsmUsdAsmCsdAsmU | |
| | G | 2734_as | | | sdAsmUsdTsmUsdGs | |
| | | | | | mCsdAsmAsdG | |
| 249 | ACACAGGTT | NM_00524 | 2 | −14.1 | mAsdCsmAsdCsmAsd | 633 |
| | ACATATTTGC | 9.5_2717- | | | GsmGsdTsmUsdAsmC | |
| | A | 2736_as | | | sdAsmUsdAsmUsdTs | |
| | | | | | mUsdGsmCsdA | |
| 250 | AACACAGGT | NM_00524 | 2 | −10.4 | mAsdAsmCsdAsmCsd | 634 |
| | TACATATTTG | 9.5_2718- | | | AsmGsdGsmUsdTsmA | |
| | C | 2737_as | | | sdCsmAsdTsmAsdTsm | |
| | | | | | UsdTsmGsdC | |
| 251 | GCAACACAG | NM_00524 | 2 | −6.2 | mGsdCsmAsdAsmCsd | 635 |
| | GTTACATATT | 9.5_2720- | | | AsmCsdAsmGsdGsmU | |
| | T | 2739_as | | | sdTsmAsdCsmAsdTsm | |
| | | | | | AsdTsmUsdT | |
| 252 | GCGCAACAC | NM_00524 | 3 | −9.2 | mGsdCsmGsdCsmAsd | 636 |
| | AGGTTACAT | 9.5_2722- | | | AsmCsdAsmCsdAsmG | |
| | AT | 2741_as | | | sdGsmUsdTsmAsdCs | |
| | | | | | mAsdTsmAsdT | |
| 253 | TGCGCAACA | NM_00524 | 2 | −9.1 | mUsdGsmCsdGsmCsd | 637 |
| | CAGGTTACA | 9.5_2723- | | | AsmAsdCsmAsdCsmA | |
| | TA | 2742_as | | | sdGsmGsdTsmUsdAs | |
| | | | | | mCsdAsmUsdA | |
| 254 | TTGCGCAAC | NM_00524 | 2 | −8.8 | mUsdTsmGsdCsmGsd | 638 |
| | ACAGGTTAC | 9.5_2724- | | | CsmAsdAsmCsdAsmC | |
| | AT | 2743_as | | | sdAsmGsdGsmUsdTs | |
| | | | | | mAsdCsmAsdT | |
| 255 | TTTGCGCAAC | NM_00524 | 2 | −8.8 | mUsdTsmUsdGsmCsd | 639 |
| | ACAGGTTAC | 9.5_2725- | | | GsmCsdAsmAsdCsmA | |
| | A | 2744_as | | | sdCsmAsdGsmGsdTs | |
| | | | | | mUsdAsmCsdA | |
| 256 | CATTTGCGCA | NM_00524 | 2 | −7.3 | mCsdAsmUsdTsmUsd | 640 |
| | ACACAGGTT | 9.5_2727- | | | GsmCsdGsmCsdAsmA | |
| | A | 2746_as | | | sdCsmAsdCsmAsdGs | |
| | | | | | mGsdTsmUsdA | |
| 257 | ACTCAAATTT | NM_00524 | 2 | −6.1 | mAsdCsmUsdCsmAsd | 641 |
| | ATGCGGCAT | 9.5_2743- | | | AsmAsdTsmUsdTsmA | |
| | T | 2762_as | | | sdTsmGsdCsmGsdGs | |
| | | | | | mCsdAsmUsdT | |
| 258 | ATCACTCAA | NM_00524 | 3 | −8.3 | mAsdTsmCsdAsmCsd | 642 |
| | ATTTATGCGG | 9.5_2746- | | | TsmCsdAsmAsdAsmU | |
| | C | 2765_as | | | sdTsmUsdAsmUsdGs | |
| | | | | | mCsdGsmGsdC | |
| 259 | ACATTAACA | NM_00524 | 2 | −7.7 | mAsdCsmAsdTsmUsd | 643 |
| | ATCACTCAA | 9.5_2755- | | | AsmAsdCsmAsdAsmU | |
| | AT | 2774_as | | | sdCsmAsdCsmUsdCs | |
| | | | | | mAsdAsmAsdT | |
| 260 | CAACATTAA | NM_00524 | 2 | −10.3 | mCsdAsmAsdCsmAsd | 644 |
| | CAATCACTC | 9.5_2757- | | | TsmUsdAsmAsdCsmA | |
| | AA | 2776_as | | | sdAsmUsdCsmAsdCs | |
| | | | | | mUsdCsmAsdA | |
| 261 | ACAACATTA | NM_00524 | 2 | −12.1 | mAsdCsmAsdAsmCsd | 645 |
| | ACAATCACT | 9.5_2758- | | | AsmUsdTsmAsdAsmC | |
| | CA | 2777_as | | | sdAsmAsdTsmCsdAs | |
| | | | | | mCsdTsmCsdA | |
| 262 | GACAACATT | NM_00524 | 2 | −14.3 | mGsdAsmCsdAsmAsd | 646 |
| | AACAATCAC | 9.5_2759- | | | CsmAsdTsmUsdAsmA | |
| | TC | 2778_as | | | sdCsmAsdAsmUsdCs | |
| | | | | | mAsdCsmUsdC | |
| 263 | AGACAACAT | NM_00524 | 2 | −11.1 | mAsdGsmAsdCsmAsd | 647 |
| | TAACAATCA | 9.5_2760- | | | AsmCsdAsmUsdTsmA | |
| | CT | 2779_as | | | sdAsmCsdAsmAsdTs | |
| | | | | | mCsdAsmCsdT | |
| 264 | ACCACAGTA | NM_00524 | 2 | −8.9 | mAsdCsmCsdAsmCsd | 648 |
| | TCACAATCA | 9.5_2788- | | | AsmGsdTsmAsdTsmC | |
| | AG | 2807_as | | | sdAsmCsdAsmAsdTs | |
| | | | | | mCsdAsmAsdG | |
| 265 | GACCACAGT | NM_00524 | 2 | −9.5 | mGsdAsmCsdCsmAsd | 649 |
| | ATCACAATC | 9.5_2789- | | | CsmAsdGsmUsdAsmU | |
| | AA | 2808_as | | | sdCsmAsdCsmAsdAs | |
| | | | | | mUsdCsmAsdA | |
| 266 | TGACCACAG | NM_00524 | 2 | −6.5 | mUsdGsmAsdCsmCsd | 650 |
| | TATCACAATC | 9.5_2790- | | | AsmCsdAsmGsdTsmA | |
| | A | 2809_as | | | sdTsmCsdAsmCsdAsm | |
| | | | | | AsdTsmCsdA | |
| 267 | ATGACCACA | NM_00524 | 2 | −6.8 | mAsdTsmGsdAsmCsd | 651 |
| | GTATCACAA | 9.5_2791- | | | CsmAsdCsmAsdGsmU | |
| | TC | 2810_as | | | sdAsmUsdCsmAsdCs | |
| | | | | | mAsdAsmUsdC | |
| 268 | CATATGACC | NM_00524 | 2 | −10.5 | mCsdAsmUsdAsmUsd | 652 |
| | ACAGTATCA | 9.5_2794- | | | GsmAsdCsmCsdAsmC | |
| | CA | 2813_as | | | sdAsmGsdTsmAsdTsm | |
| | | | | | CsdAsmCsdA | |
| 269 | GCATATGAC | NM_00524 | 2 | −11.6 | mGsdCsmAsdTsmAsd | 653 |
| | CACAGTATC | 9.5_2795- | | | TsmGsdAsmCsdCsmA | |
| | AC | 2814_as | | | sdCsmAsdGsmUsdAs | |
| | | | | | mUsdCsmAsdC | |
| 270 | GACAAACAC | NM_00524 | 2 | −10.5 | mGsdAsmCsdAsmAsd | 654 |
| | GGGCATATG | 9.5_2806- | | | AsmCsdAsmCsdGsmG | |
| | AC | 2825_as | | | sdGsmCsdAsmUsdAs | |
| | | | | | mUsdGsmAsdC | |
| 271 | TGACAAACA | NM_00524 | 2 | −8.8 | mUsdGsmAsdCsmAsd | 655 |
| | CGGGCATAT | 9.5_2807- | | | AsmAsdCsmAsdCsmG | |
| | GA | 2826_as | | | sdGsmGsdCsmAsdTs | |
| | | | | | mAsdTsmGsdA | |
| 272 | GTTCATAGTA | NM_00524 | 2 | −7.4 | mGsdTsmUsdCsmAsd | 656 |
| | AACATTTTTG | 9.5_2831- | | | TsmAsdGsmUsdAsmA | |
| | | 2850_as | | | sdAsmCsdAsmUsdTs | |
| | | | | | mUsdTsmUsdG | |
| 273 | GTGTTCATAG | NM_00524 | 2 | −8.2 | mGsdTsmGsdTsmUsd | 657 |
| | TAAACATTTT | 9.5_2833- | | | CsmAsdTsmAsdGsmU | |
| | | 2852_as | | | sdAsmAsdAsmCsdAs | |
| | | | | | mUsdTsmUsdT | |
| 274 | TGTGTTCATA | NM_00524 | 2 | −7.6 | mUsdGsmUsdGsmUsd | 658 |
| | GTAAACATTT | 9.5_2834- | | | TsmCsdAsmUsdAsmG | |
| | | 2853_as | | | sdTsmAsdAsmAsdCs | |
| | | | | | mAsdTsmUsdT | |
| 275 | TCTGTGTGTT | NM_00524 | 2 | −11.1 | mUsdCsmUsdGsmUsd | 659 |
| | CATAGTAAA | 9.5_2838- | | | GsmUsdGsmUsdTsmC | |
| | C | 2857_as | | | sdAsmUsdAsmGsdTs | |
| | | | | | mAsdAsmAsdC | |
| 276 | TTCTGTGTGT | NM_00524 | 2 | −8.5 | mUsdTsmCsdTsmGsd | 660 |
| | TCATAGTAA | 9.5_2839- | | | TsmGsdTsmGsdTsmU | |
| | A | 2858_as | | | sdCsmAsdTsmAsdGs | |
| | | | | | mUsdAsmAsdA | |
| 277 | TATTTCTGTG | NM_00524 | 2 | −6.6 | mUsdAsmUsdTsmUsd | 661 |
| | TGTTCATAGT | 9.5_2842- | | | CsmUsdGsmUsdGsmU | |
| | | 2861_as | | | sdGsmUsdTsmCsdAs | |
| | | | | | mUsdAsmGsdT | |
| 278 | GATATATAT | NM_00524 | 2 | −12.2 | mGsdAsmUsdAsmUsd | 662 |
| | GAATTTAGC | 9.5_2868- | | | AsmUsdAsmUsdGsm | |
| | CT | 2887_as | | | AsdAsmUsdTsmUsdA | |
| | | | | | smGsdCsmCsdT | |
| 279 | AGATATATA | NM_00524 | 2 | −7.7 | mAsdGsmAsdTsmAsd | 663 |
| | TGAATTTAGC | 9.5_2869- | | | TsmAsdTsmAsdTsmG | |
| | C | 2888_as | | | sdAsmAsdTsmUsdTsm | |
| | | | | | AsdGsmCsdC | |
| 280 | AGACAAAAG | NM_00524 | 2 | −9 | mAsdGsmAsdCsmAsd | 664 |
| | TATCAAGAT | 9.5_2883- | | | AsmAsdAsmGsdTsmA | |
| | AT | 2902_as | | | sdTsmCsdAsmAsdGs | |
| | | | | | mAsdTsmAsdT | |
| 281 | AGTTGATTG | NM_00524 | 2 | −7.2 | mAsdGsmUsdTsmGsd | 665 |
| | GTCTTTAAAA | 9.5_2924- | | | AsmUsdTsmGsdGsmU | |
| | A | 2943_as | | | sdCsmUsdTsmUsdAs | |
| | | | | | mAsdAsmAsdA | |
| 282 | CCCTATAAGT | NM_00524 | 2 | −6.3 | mCsdCsmCsdTsmAsd | 666 |
| | TGATTGGTCT | 9.5_2931- | | | TsmAsdAsmGsdTsmU | |
| | | 2950_as | | | sdGsmAsdTsmUsdGs | |
| | | | | | mGsdTsmCsdT | |
| 283 | AAAAAGCCT | NM_00524 | 2 | −6.5 | mAsdAsmAsdAsmAsd | 667 |
| | TTGAATTCCC | 9.5_2947- | | | GsmCsdCsmUsdTsmU | |
| | T | 2966_as | | | sdGsmAsdAsmUsdTs | |
| | | | | | mCsdCsmCsdT | |
| 284 | TAAATTTTAG | NM_00524 | 2 | −11.6 | mUsdAsmAsdAsmUsd | 668 |
| | TTTGGCTGAA | 9.5_2965- | | | TsmUsdTsmAsdGsmU | |
| | | 2984_as | | | sdTsmUsdGsmGsdCs | |
| | | | | | mUsdGsmAsdA | |
| 285 | TTAAATTTTA | NM_00524 | 2 | −12.4 | mUsdTsmAsdAsmAsd | 669 |
| | GTTTGGCTGA | 9.5_2966- | | | TsmUsdTsmUsdAsmG | |
| | | 2985_as | | | sdTsmUsdTsmGsdGsm | |
| | | | | | CsdTsmGsdA | |
| 286 | TTTAAATTTT | NM_00524 | 2 | −11.9 | mUsdTsmUsdAsmAsd | 670 |
| | AGTTTGGCTG | 9.5_2967- | | | AsmUsdTsmUsdTsmA | |
| | | 2986_as | | | sdGsmUsdTsmUsdGs | |
| | | | | | mGsdCsmUsdG | |
| 287 | GTTTAAATTT | NM_00524 | 2 | −10.4 | mGsdTsmUsdTsmAsd | 671 |
| | TAGTTTGGCT | 9.5_2968- | | | AsmAsdTsmUsdTsmU | |
| | | 2987_as | | | sdAsmGsdTsmUsdTsm | |
| | | | | | GsdGsmCsdT | |
| 288 | TTAGAGTCA | NM_00524 | 2 | −10.9 | mUsdTsmAsdGsmAsd | 672 |
| | GTTCAAATTA | 9.5_2995- | | | GsmUsdCsmAsdGsmU | |
| | A | 3014_as | | | sdTsmCsdAsmAsdAs | |
| | | | | | mUsdTsmAsdA | |
| 289 | TTTAGAGTCA | NM_00524 | 2 | −11.7 | mUsdTsmUsdAsmGsd | 673 |
| | GTTCAAATTA | 9.5_2996- | | | AsmGsdTsmCsdAsmG | |
| | | 3015_as | | | sdTsmUsdCsmAsdAs | |
| | | | | | mAsdTsmUsdA | |
| 290 | TTTTAGAGTC | NM_00524 | 2 | −14.6 | mUsdTsmUsdTsmAsd | 674 |
| | AGTTCAAATT | 9.5_2997- | | | GsmAsdGsmUsdCsmA | |
| | | 3016_as | | | sdGsmUsdTsmCsdAs | |
| | | | | | mAsdAsmUsdT | |
| 291 | TCATTTTTAG | NM_00524 | 2 | −9.8 | mUsdCsmAsdTsmUsd | 675 |
| | AGTCAGTTC | 9.5_3001- | | | TsmUsdTsmAsdGsmA | |
| | A | 3020_as | | | sdGsmUsdCsmAsdGs | |
| | | | | | mUsdTsmCsdA | |
| 292 | TTCATTTTTA | NM_00524 | 2 | −9.2 | mUsdTsmCsdAsmUsd | 676 |
| | GAGTCAGTT | 9.5_3002- | | | TsmUsdTsmUsdAsmG | |
| | C | 3021_as | | | sdAsmGsdTsmCsdAs | |
| | | | | | mGsdTsmUsdC | |
| 293 | GTTCACAAA | NM_00524 | 2 | −9 | mGsdTsmUsdCsmAsd | 677 |
| | GGGAAAAAT | 9.5_3026- | | | CsmAsdAsmAsdGsmG | |
| | AC | 3045_as | | | sdGsmAsdAsmAsdAs | |
| | | | | | mAsdTsmAsdC | |
| 294 | CTGCTCCTTG | NM_00524 | 2 | −6.5 | mCsdTsmGsdCsmUsd | 678 |
| | TAAAATTTGT | 9.5_3044- | | | CsmCsdTsmUsdGsmU | |
| | | 3063_as | | | sdAsmAsdAsmAsdTs | |
| | | | | | mUsdTsmGsdT | |
| 29.5 | GCTGCTCCTT | NM_00524 | 2 | −7.1 | mGsdCsmUsdGsmCsd | 679 |
| | GTAAAATTT | 9.5_3045- | | | TsmCsdCsmUsdTsmG | |
| | G | 3064_as | | | sdTsmAsdAsmAsdAs | |
| | | | | | mUsdTsmUsdG | |
| 296 | TGTTTATTAA | NM_00524 | 2 | −7.1 | mUsdGsmUsdTsmUsd | 680 |
| | ATAGGCTGC | 9.5_3059- | | | AsmUsdTsmAsdAsmA | |
| | T | 3078_as | | | sdTsmAsdGsmGsdCs | |
| | | | | | mUsdGsmCsdT | |
| 297 | GTGTTTATTA | NM_00524 | 2 | −7.1 | mGsdTsmGsdTsmUsd | 681 |
| | AATAGGCTG | 9.5_3060- | | | TsmAsdTsmUsdAsmA | |
| | C | 3079_as | | | sdAsmUsdAsmGsdGs | |
| | | | | | mCsdTsmGsdC | |
| 298 | TAGTGTTTAT | NM_00524 | 2 | −12.4 | mUsdAsmGsdTsmGsd | 682 |
| | TAAATAGGC | 9.5_3062- | | | TsmUsdTsmAsdTsmU | |
| | T | 3081_as | | | sdAsmAsdAsmUsdAs | |
| | | | | | mGsdGsmCsdT | |
| 299 | CTAGTGTTTA | NM_00524 | 2 | −11.4 | mCsdTsmAsdGsmUsd | 683 |
| | TTAAATAGG | 9.5_3063- | | | GsmUsdTsmUsdAsmU | |
| | C | 3082_as | | | sdTsmAsdAsmAsdTsm | |
| | | | | | AsdGsmGsdC | |
| 300 | GCTAGTGTTT | NM_00524 | 2 | −11.4 | mGsdCsmUsdAsmGsd | 684 |
| | ATTAAATAG | 9.5_3064- | | | TsmGsdTsmUsdTsmA | |
| | G | 3083_as | | | sdTsmUsdAsmAsdAs | |
| | | | | | mUsdAsmGsdG | |
| 301 | AAAGCCTAT | NM_00524 | 2 | −11.4 | mAsdAsmAsdGsmCsd | 685 |
| | ACTTTGTTTA | 9.5_3085- | | | CsmUsdAsmUsdAsmC | |
| | A | 3104_as | | | sdTsmUsdTsmGsdTsm | |
| | | | | | UsdTsmAsdA | |
| 302 | TCAGCTGAA | NM_00524 | 2 | −9.1 | mUsdCsmAsdGsmCsd | 686 |
| | AAGCCTATA | 9.5_3093- | | | TsmGsdAsmAsdAsmA | |
| | CT | 3112_as | | | sdGsmCsdCsmUsdAs | |
| | | | | | mUsdAsmCsdT | |
| 303 | ATCAGCTGA | NM_00524 | 2 | −9 | mAsdTsmCsdAsmGsd | 687 |
| | AAAGCCTAT | 9.5_3094- | | | CsmUsdGsmAsdAsmA | |
| | AC | 3113_as | | | sdAsmGsdCsmCsdTsm | |
| | | | | | AsdTsmAsdC | |
| 304 | TATCAGCTG | NM_00524 | 2 | −11.2 | mUsdAsmUsdCsmAsd | 688 |
| | AAAAGCCTA | 9.5_3095- | | | GsmCsdTsmGsdAsmA | |
| | TA | 3114_as | | | sdAsmAsdGsmCsdCs | |
| | | | | | mUsdAsmUsdA | |
| 305 | GTATCAGCT | NM_00524 | 2 | −11.2 | mGsdTsmAsdTsmCsd | 689 |
| | GAAAAGCCT | 9.5_3096- | | | AsmGsdCsmUsdGsmA | |
| | AT | 3115_as | | | sdAsmAsdAsmGsdCs | |
| | | | | | mCsdTsmAsdT | |
| 306 | GGTATCAGC | NM_00524 | 2 | −9.3 | mGsdGsmUsdAsmUsd | 690 |
| | TGAAAAGCC | 9.5_3097- | | | CsmAsdGsmCsdTsmG | |
| | TA | 3116_as | | | sdAsmAsdAsmAsdGs | |
| | | | | | mCsdCsmUsdA | |
| 307 | TGTATATCCA | NM_00524 | 2 | −5.9 | mUsdGsmUsdAsmUsd | 691 |
| | CAGAAACTT | 9.5_3119- | | | AsmUsdCsmCsdAsmC | |
| | A | 3138_as | | | sdAsmGsdAsmAsdAs | |
| | | | | | mCsdTsmUsdA | |
| 308 | CTTTTTGCTG | NM_00524 | 2 | −9.6 | mCsdTsmUsdTsmUsd | 692 |
| | TATATCCACA | 9.5_3127- | | | TsmGsdCsmUsdGsmU | |
| | | 3146_as | | | sdAsmUsdAsmUsdCs | |
| | | | | | mCsdAsmCsdA | |
| 309 | TCTTTTTGCT | NM_00524 | 2 | −8.6 | mUsdCsmUsdTsmUsd | 693 |
| | GTATATCCAC | 9.5_3128- | | | TsmUsdGsmCsdTsmG | |
| | | 3147_as | | | sdTsmAsdTsmAsdTsm | |
| | | | | | CsdCsmAsdC | |
| 310 | CTCTTTTTGC | NM_00524 | 2 | −8 | mCsdTsmCsdTsmUsd | 694 |
| | TGTATATCCA | 9.5_3129- | | | TsmUsdTsmGsdCsmU | |
| | | 3148_as | | | sdGsmUsdAsmUsdAs | |
| | | | | | mUsdCsmCsdA | |
| 311 | TCTCTTTTTG | NM_00524 | 2 | −11.8 | mUsdCsmUsdCsmUsd | 695 |
| | CTGTATATCC | 9.5_3130- | | | TsmUsdTsmUsdGsmC | |
| | | 3149_as | | | sdTsmGsdTsmAsdTsm | |
| | | | | | AsdTsmCsdC | |
| 312 | ATCTCTTTTT | NM_00524 | 2 | −12.6 | mAsdTsmCsdTsmCsd | 696 |
| | GCTGTATATC | 9.5_3131- | | | TsmUsdTsmUsdTsmG | |
| | | 3150_as | | | sdCsmUsdGsmUsdAs | |
| | | | | | mUsdAsmUsdC | |
| 313 | ATATCTCTTT | NM_00524 | 2 | −15.3 | mAsdTsmAsdTsmCsd | 697 |
| | TTGCTGTATA | 9.5_3133- | | | TsmCsdTsmUsdTsmU | |
| | | 3152_as | | | sdTsmGsdCsmUsdGs | |
| | | | | | mUsdAsmUsdA | |
| 314 | TATATCTCTT | NM_00524 | 2 | −15.3 | mUsdAsmUsdAsmUsd | 698 |
| | TTTGCTGTAT | 9.5_3134- | | | CsmUsdCsmUsdTsmU | |
| | | 3153_as | | | sdTsmUsdGsmCsdTsm | |
| | | | | | GsdTsmAsdT | |
| 315 | TTATATCTCT | NM_00524 | 2 | −15.4 | mUsdTsmAsdTsmAsd | 699 |
| | TTTTGCTGTA | 9.5_3135- | | | TsmCsdTsmCsdTsmUs | |
| | | 3154_as | | | dTsmUsdTsmGsdCsm | |
| | | | | | UsdGsmUsdA | |
| 316 | ATTATATCTC | NM_00524 | 2 | −15.7 | mAsdTsmUsdAsmUsd | 700 |
| | TTTTTGCTGT | 9.5_3136- | | | AsmUsdCsmUsdCsmU | |
| | | 3155_as | | | sdTsmUsdTsmUsdGsm | |
| | | | | | CsdTsmGsdT | |
| 317 | AATTATATCT | NM_00524 | 2 | −13.8 | mAsdAsmUsdTsmAsd | 701 |
| | CTTTTTGCTG | 9.5_3137- | | | TsmAsdTsmCsdTsmCs | |
| | | 3156_as | | | dTsmUsdTsmUsdTsm | |
| | | | | | GsdCsmUsdG | |
| 318 | GGTAAAGAG | NM_00524 | 2 | −7.8 | mGsdGsmUsdAsmAsd | 702 |
| | CTATGCACA | 9.5_3163- | | | AsmGsdAsmGsdCsmU | |
| | GA | 3182_as | | | sdAsmUsdGsmCsdAs | |
| | | | | | mCsdAsmGsdA | |
| 319 | GGGTAAAGA | NM_00524 | 3 | −9 | mGsdGsmGsdTsmAsd | 703 |
| | GCTATGCAC | 9.5_3164- | | | AsmAsdGsmAsdGsmC | |
| | AG | 3183_as | | | sdTsmAsdTsmGsdCsm | |
| | | | | | AsdCsmAsdG | |
| 320 | AGGGTAAAG | NM_00524 | 2 | −10.9 | mAsdGsmGsdGsmUsd | 704 |
| | AGCTATGCA | 9.5_3165- | | | AsmAsdAsmGsdAsm | |
| | CA | 3184_as | | | GsdCsmUsdAsmUsdG | |
| | | | | | smCsdAsmCsdA | |
| 321 | CAGGGTAAA | NM_00524 | 2 | −10.8 | mCsdAsmGsdGsmGsd | 705 |
| | GAGCTATGC | 9.5_3166- | | | TsmAsdAsmAsdGsmA | |
| | AC | 3185_as | | | sdGsmCsdTsmAsdTsm | |
| | | | | | GsdCsmAsdC | |
| 322 | ACAGGGTAA | NM_00524 | 2 | −10 | mAsdCsmAsdGsmGsd | 706 |
| | AGAGCTATG | 9.5_3167- | | | GsmUsdAsmAsdAsm | |
| | CA | 3186_as | | | GsdAsmGsdCsmUsdA | |
| | | | | | smUsdGsmCsdA | |
| 323 | AACACAGGG | NM_00524 | 2 | −7.6 | mAsdAsmCsdAsmCsd | 707 |
| | TAAAGAGCT | 9.5_3170- | | | AsmGsdGsmGsdTsmA | |
| | AT | 3189_as | | | sdAsmAsdGsmAsdGs | |
| | | | | | mCsdTsmAsdT | |
| 324 | GCCAAGCTC | NM_00524 | 2 | −5.9 | mGsdCsmCsdAsmAsd | 708 |
| | TATTAACAAT | 9.5_3240- | | | GsmCsdTsmCsdTsmA | |
| | A | 3259_as | | | sdTsmUsdAsmAsdCs | |
| | | | | | mAsdAsmUsdA | |
| 325 | TGCCAAGCT | NM_00524 | 2 | −7.4 | mUsdGsmCsdCsmAsd | 709 |
| | CTATTAACA | 9.5_3241- | | | AsmGsdCsmUsdCsmU | |
| | AT | 3260_as | | | sdAsmUsdTsmAsdAs | |
| | | | | | mCsdAsmAsdT | |
| 326 | TTGCCAAGCT | NM_00524 | 2 | −7.5 | mUsdTsmGsdCsmCsd | 710 |
| | CTATTAACA | 9.5_3242- | | | AsmAsdGsmCsdTsmC | |
| | A | 3261_as | | | sdTsmAsdTsmUsdAsm | |
| | | | | | AsdCsmAsdA | |
| 327 | TTTGCCAAGC | NM_00524 | 2 | −6.5 | mUsdTsmUsdGsmCsd | 711 |
| | TCTATTAACA | 9.5_3243- | | | CsmAsdAsmGsdCsmU | |
| | | 3262_as | | | sdCsmUsdAsmUsdTs | |
| | | | | | mAsdAsmCsdA | |
| 328 | ATAATTTGCC | NM_00524 | 2 | −9.7 | mAsdTsmAsdAsmUsd | 712 |
| | AAGCTCTATT | 9.5_3247- | | | TsmUsdGsmCsdCsmA | |
| | | 3266_as | | | sdAsmGsdCsmUsdCs | |
| | | | | | mUsdAsmUsdT | |
| 329 | TATAATTTGC | NM_00524 | 2 | −9.7 | mUsdAsmUsdAsmAsd | 713 |
| | CAAGCTCTAT | 9.5_3248- | | | TsmUsdTsmGsdCsmC | |
| | | 3267_as | | | sdAsmAsdGsmCsdTs | |
| | | | | | mCsdTsmAsdT | |
| 330 | TTATAATTTG | NM_00524 | 2 | −9.8 | mUsdTsmAsdTsmAsd | 714 |
| | CCAAGCTCT | 9.5_3249- | | | AsmUsdTsmUsdGsmC | |
| | A | 3268_as | | | sdCsmAsdAsmGsdCs | |
| | | | | | mUsdCsmUsdA | |
| 331 | ATTTATAATT | NM_00524 | 2 | −7.9 | mAsdTsmUsdTsmAsd | 715 |
| | TGCCAAGCT | 9.5_3251- | | | TsmAsdAsmUsdTsmU | |
| | C | 3270_as | | | sdGsmCsdCsmAsdAs | |
| | | | | | mGsdCsmUsdC | |
| 332 | TATTTATAAT | NM_00524 | 2 | −5.9 | mUsdAsmUsdTsmUsd | 716 |
| | TTGCCAAGCT | 9.5_3252- | | | AsmUsdAsmAsdTsmU | |
| | | 3271_as | | | sdTsmGsdCsmCsdAsm | |
| | | | | | AsdGsmCsdT | |
| 333 | TTATTTATAA | NM_00524 | 2 | −6.9 | mUsdTsmAsdTsmUsd | 717 |
| | TTTGCCAAGC | 9.5_3253- | | | TsmAsdTsmAsdAsmU | |
| | | 3272_as | | | sdTsmUsdGsmCsdCsm | |
| | | | | | AsdAsmGsdC | |
| 334 | ACTTCTATCT | NM_00524 | 2 | −7.7 | mAsdCsmUsdTsmCsd | 718 |
| | AACCATATA | 9.5_3279- | | | TsmAsdTsmCsdTsmA | |
| | C | 3298_as | | | sdAsmCsdCsmAsdTsm | |
| | | | | | AsdTsmAsdC | |
| 335 | GTCACTTCTA | NM_00524 | 2 | −10.7 | mGsdTsmCsdAsmCsd | 719 |
| | TCTAACCATA | 9.5_3282- | | | TsmUsdCsmUsdAsmU | |
| | | 3301_as | | | sdCsmUsdAsmAsdCs | |
| | | | | | mCsdAsmUsdA | |
| 336 | AGTCACTTCT | NM_00524 | 2 | −12.6 | mAsdGsmUsdCsmAsd | 720 |
| | ATCTAACCAT | 9.5_3283- | | | CsmUsdTsmCsdTsmA | |
| | | 3302_as | | | sdTsmCsdTsmAsdAsm | |
| | | | | | CsdCsmAsdT | |
| 337 | TAGTCACTTC | NM_00524 | 2 | −10 | mUsdAsmGsdTsmCsd | 721 |
| | TATCTAACCA | 9.5_3284- | | | AsmCsdTsmUsdCsmU | |
| | | 3303_as | | | sdAsmUsdCsmUsdAs | |
| | | | | | mAsdCsmCsdA | |
| 338 | ATAGTCACTT | NM_00524 | 2 | −11.6 | mAsdTsmAsdGsmUsd | 722 |
| | CTATCTAACC | 9.5_3285- | | | CsmAsdCsmUsdTsmC | |
| | | 3304_as | | | sdTsmAsdTsmCsdTsm | |
| | | | | | AsdAsmCsdC | |
| 339 | TATAGTCACT | NM_00524 | 2 | −9.3 | mUsdAsmUsdAsmGsd | 723 |
| | TCTATCTAAC | 9.5_3286- | | | TsmCsdAsmCsdTsmU | |
| | | 3305_as | | | sdCsmUsdAsmUsdCs | |
| | | | | | mUsdAsmAsdC | |
| 340 | TTATAGTCAC | NM_00524 | 2 | −7.6 | mUsdTsmAsdTsmAsd | 724 |
| | TTCTATCTAA | 9.5_3287- | | | GsmUsdCsmAsdCsmU | |
| | | 3306_as | | | sdTsmCsdTsmAsdTsm | |
| | | | | | CsdTsmAsdA | |
| 341 | ATTATAGTCA | NM_00524 | 2 | −7.5 | mAsdTsmUsdAsmUsd | 725 |
| | CTTCTATCTA | 9.5_3288- | | | AsmGsdTsmCsdAsmC | |
| | | 3307_as | | | sdTsmUsdCsmUsdAs | |
| | | | | | mUsdCsmUsdA | |
| 342 | CATTATAGTC | NM_00524 | 2 | −6.7 | mCsdAsmUsdTsmAsd | 726 |
| | ACTTCTATCT | 9.5_3289- | | | TsmAsdGsmUsdCsmA | |
| | | 3308_as | | | sdCsmUsdTsmCsdTsm | |
| | | | | | AsdTsmCsdT | |
| 343 | GCATTATAGT | NM_00524 | 2 | −9.6 | mGsdCsmAsdTsmUsd | 727 |
| | CACTTCTATC | 9.5_3290- | | | AsmUsdAsmGsdTsmC | |
| | | 3309_as | | | sdAsmCsdTsmUsdCsm | |
| | | | | | UsdAsmUsdC | |
| 344 | TGCATTATAG | NM_00524 | 2 | −9.2 | mUsdGsmCsdAsmUsd | 728 |
| | TCACTTCTAT | 9.5_3291- | | | TsmAsdTsmAsdGsmU | |
| | | 3310_as | | | sdCsmAsdCsmUsdTsm | |
| | | | | | CsdTsmAsdT | |
| 345 | GTGCATTATA | NM_00524 | 2 | −6.4 | mGsdTsmGsdCsmAsd | 729 |
| | GTCACTTCTA | 9.5_3292- | | | TsmUsdAsmUsdAsmG | |
| | | 3311_as | | | sdTsmCsdAsmCsdTsm | |
| | | | | | UsdCsmUsdA | |
| 346 | GGGCTCTGT | NM_00524 | 2 | −6 | mGsdGsmGsdCsmUsd | 730 |
| | GTGTCTATAT | 9.5_3324- | | | CsmUsdGsmUsdGsmU | |
| | A | 3343_as | | | sdGsmUsdCsmUsdAs | |
| | | | | | mUsdAsmUsdA | |
| 347 | AGGGCTCTG | NM_00524 | 2 | −7.6 | mAsdGsmGsdGsmCsd | 731 |
| | TGTGTCTATA | 9.5_3325- | | | TsmCsdTsmGsdTsmG | |
| | T | 3344_as | | | sdTsmGsdTsmCsdTsm | |
| | | | | | AsdTsmAsdT | |
| 348 | AAGGGCTCT | NM_00524 | 2 | −8 | mAsdAsmGsdGsmGsd | 732 |
| | GTGTGTCTAT | 9.5_3326- | | | CsmUsdCsmUsdGsmU | |
| | A | 3345_as | | | sdGsmUsdGsmUsdCs | |
| | | | | | mUsdAsmUsdA | |
| 349 | GAAGGGCTC | NM_00524 | 2 | −10.6 | mGsdAsmAsdGsmGsd | 733 |
| | TGTGTGTCTA | 9.5_3327- | | | GsmCsdTsmCsdTsmG | |
| | T | 3346_as | | | sdTsmGsdTsmGsdTsm | |
| | | | | | CsdTsmAsdT | |
| 350 | TGAAGGGCT | NM_00524 | 2 | −11.4 | mUsdGsmAsdAsmGsd | 734 |
| | CTGTGTGTCT | 9.5_3328- | | | GsmGsdCsmUsdCsmU | |
| | A | 3347_as | | | sdGsmUsdGsmUsdGs | |
| | | | | | mUsdCsmUsdA | |
| 351 | ACTGAAGGG | NM_00524 | 2 | −14.8 | mAsdCsmUsdGsmAsd | 735 |
| | CTCTGTGTGT | 9.5_3330- | | | AsmGsdGsmGsdCsmU | |
| | C | 3349_as | | | sdCsmUsdGsmUsdGs | |
| | | | | | mUsdGsmUsdC | |
| 352 | GAACTGAAG | NM_00524 | 2 | −9.3 | mGsdAsmAsdCsmUsd | 736 |
| | GGCTCTGTGT | 9.5_3332- | | | GsmAsdAsmGsdGsm | |
| | G | 3351_as | | | GsdCsmUsdCsmUsdG | |
| | | | | | smUsdGsmUsdG | |
| 353 | TGAACTGAA | NM_00524 | 2 | −13.1 | mUsdGsmAsdAsmCsd | 737 |
| | GGGCTCTGT | 9.5_3333- | | | TsmGsdAsmAsdGsmG | |
| | GT | 3352_as | | | sdGsmCsdTsmCsdTsm | |
| | | | | | GsdTsmGsdT | |
| 354 | CTGAACTGA | NM_00524 | 2 | −10 | mCsdTsmGsdAsmAsd | 738 |
| | AGGGCTCTG | 9.5_3334- | | | CsmUsdGsmAsdAsmG | |
| | TG | 3353_as | | | sdGsmGsdCsmUsdCs | |
| | | | | | mUsdGsmUsdG | |
| 355 | CCTGAACTG | NM_00524 | 2 | −12.5 | mCsdCsmUsdGsmAsd | 739 |
| | AAGGGCTCT | 9.5_3335- | | | AsmCsdTsmGsdAsmA | |
| | GT | 3354_as | | | sdGsmGsdGsmCsdTs | |
| | | | | | mCsdTsmGsdT | |
| 356 | AAATTGTAC | NM_00524 | 2 | −6.4 | mAsdAsmAsdTsmUsd | 740 |
| | CTGAACTGA | 9.5_3343- | | | GsmUsdAsmCsdCsmU | |
| | AG | 3362_as | | | sdGsmAsdAsmCsdTs | |
| | | | | | mGsdAsmAsdG | |
| 357 | CAAATTGTA | NM_00524 | 2 | −7.1 | mCsdAsmAsdAsmUsd | 741 |
| | CCTGAACTG | 9.5_3344- | | | TsmGsdTsmAsdCsmC | |
| | AA | 3363_as | | | sdTsmGsdAsmAsdCs | |
| | | | | | mUsdGsmAsdA | |
| 358 | GCAAATTGT | NM_00524 | 2 | −9.6 | mGsdCsmAsdAsmAsd | 742 |
| | ACCTGAACT | 9.5_3345- | | | TsmUsdGsmUsdAsmC | |
| | GA | 3364_as | | | sdCsmUsdGsmAsdAs | |
| | | | | | mCsdTsmGsdA | |
| 359 | CGCAAATTG | NM_00524 | 3 | −8.1 | mCsdGsmCsdAsmAsd | 743 |
| | TACCTGAACT | 9.5_3346- | | | AsmUsdTsmGsdTsmA | |
| | G | 3365_as | | | sdCsmCsdTsmGsdAsm | |
| | | | | | AsdCsmUsdG | |
| 360 | GCGCAAATT | NM_00524 | 3 | −6.6 | mGsdCsmGsdCsmAsd | 744 |
| | GTACCTGAA | 9.5_3347- | | | AsmAsdTsmUsdGsmU | |
| | CT | 3366_as | | | sdAsmCsdCsmUsdGs | |
| | | | | | mAsdAsmCsdT | |
| 361 | ATAAATGCT | NM_00524 | 2 | −6.4 | mAsdTsmAsdAsmAsd | 745 |
| | GACTTAGAA | 9.5_3410- | | | TsmGsdCsmUsdGsmA | |
| | AG | 3429_as | | | sdCsmUsdTsmAsdGs | |
| | | | | | mAsdAsmAsdG | |
| 362 | AAATAAATG | NM_00524 | 2 | −6.3 | mAsdAsmAsdTsmAsd | 746 |
| | CTGACTTAG | 9.5_3412- | | | AsmAsdTsmGsdCsmU | |
| | AA | 3431_as | | | sdGsmAsdCsmUsdTs | |
| | | | | | mAsdGsmAsdA | |
| 363 | AAAATAAAT | NM_00524 | 2 | −6.3 | mAsdAsmAsdAsmUsd | 747 |
| | GCTGACTTA | 9.5_3413- | | | AsmAsdAsmUsdGsmC | |
| | GA | 3432_as | | | sdTsmGsdAsmCsdTsm | |
| | | | | | UsdAsmGsdA | |
| 364 | GTGGGTAAA | NM_00524 | 2 | −6.5 | mGsdTsmGsdGsmGsd | 748 |
| | CAGCCACAA | 9.5_3430- | | | TsmAsdAsmAsdCsmA | |
| | AA | 3449_as | | | sdGsmCsdCsmAsdCs | |
| | | | | | mAsdAsmAsdA | |
| 365 | TGTGGGTAA | NM_00524 | 2 | −7.5 | mUsdGsmUsdGsmGsd | 749 |
| | ACAGCCACA | 9.5_3431- | | | GsmUsdAsmAsdAsmC | |
| | AA | 3450_as | | | sdAsmGsdCsmCsdAs | |
| | | | | | mCsdAsmAsdA | |
| 366 | ATTGTGGGT | NM_00524 | 2 | −9.7 | mAsdTsmUsdGsmUsd | 750 |
| | AAACAGCCA | 9.5_3433- | | | GsmGsdGsmUsdAsm | |
| | CA | 3452_as | | | AsdAsmCsdAsmGsdC | |
| | | | | | smCsdAsmCsdA | |
| 367 | CATTGTGGGT | NM_00524 | 2 | −7.3 | mCsdAsmUsdTsmGsd | 751 |
| | AAACAGCCA | 9.5_3434- | | | TsmGsdGsmGsdTsmA | |
| | C | 3453_as | | | sdAsmAsdCsmAsdGs | |
| | | | | | mCsdCsmAsdC | |
| 368 | TCATTGTGGG | NM_00524 | 2 | −8 | mUsdCsmAsdTsmUsd | 752 |
| | TAAACAGCC | 9.5_3435- | | | GsmUsdGsmGsdGsm | |
| | A | 3454_as | | | UsdAsmAsdAsmCsdA | |
| | | | | | smGsdCsmCsdA | |
| 369 | TTCATTGTGG | NM_00524 | 2 | −13.5 | mUsdTsmCsdAsmUsd | 753 |
| | GTAAACAGC | 9.5_3436- | | | TsmGsdTsmGsdGsmG | |
| | C | 3455_as | | | sdTsmAsdAsmAsdCs | |
| | | | | | mAsdGsmCsdC | |
| 370 | TTTCATTGTG | NM_00524 | 2 | −12.1 | mUsdTsmUsdCsmAsd | 754 |
| | GGTAAACAG | 9.5_3437- | | | TsmUsdGsmUsdGsmG | |
| | C | 3456_as | | | sdGsmUsdAsmAsdAs | |
| | | | | | mCsdAsmGsdC | |
| 371 | CTTTCATTGT | NM_00524 | 2 | −11.2 | mCsdTsmUsdTsmCsd | 755 |
| | GGGTAAACA | 9.5_3438- | | | AsmUsdTsmGsdTsmG | |
| | G | 3457_as | | | sdGsmGsdTsmAsdAs | |
| | | | | | mAsdCsmAsdG | |
| 372 | TCTTTCATTG | NM_00524 | 2 | −11.6 | mUsdCsmUsdTsmUsd | 756 |
| | TGGGTAAAC | 9.5_3439- | | | CsmAsdTsmUsdGsmU | |
| | A | 3458_as | | | sdGsmGsdGsmUsdAs | |
| | | | | | mAsdAsmCsdA | |
| 373 | CTCTTTCATT | NM_00524 | 2 | −11.8 | mCsdTsmCsdTsmUsd | 757 |
| | GTGGGTAAA | 9.5_3440- | | | TsmCsdAsmUsdTsmG | |
| | C | 3459_as | | | sdTsmGsdGsmGsdTsm | |
| | | | | | AsdAsmAsdC | |
| 374 | ACTCTTTCAT | NM_00524 | 2 | −11.8 | mAsdCsmUsdCsmUsd | 758 |
| | TGTGGGTAA | 9.5_3441- | | | TsmUsdCsmAsdTsmU | |
| | A | 3460_as | | | sdGsmUsdGsmGsdGs | |
| | | | | | mUsdAsmAsdA | |
| 375 | AACTCTTTCA | NM_00524 | 2 | −11.8 | mAsdAsmCsdTsmCsd | 759 |
| | TTGTGGGTA | 9.5_3442- | | | TsmUsdTsmCsdAsmU | |
| | A | 3461_as | | | sdTsmGsdTsmGsdGsm | |
| | | | | | GsdTsmAsdA | |
| 376 | GAACTCTTTC | NM_00524 | 2 | −12.5 | mGsdAsmAsdCsmUsd | 760 |
| | ATTGTGGGT | 9.5_3443- | | | CsmUsdTsmUsdCsmA | |
| | A | 3462_as | | | sdTsmUsdGsmUsdGs | |
| | | | | | mGsdGsmUsdA | |
| 377 | AGAACTCTTT | NM_00524 | 2 | −12.8 | mAsdGsmAsdAsmCsd | 761 |
| | CATTGTGGGT | 9.5_3444- | | | TsmCsdTsmUsdTsmCs | |
| | | 3463_as | | | dAsmUsdTsmGsdTsm | |
| | | | | | GsdGsmGsdT | |
| 378 | TAGAACTCTT | NM_00524 | 2 | −11 | mUsdAsmGsdAsmAsd | 762 |
| | TCATTGTGGG | 9.5_3445- | | | CsmUsdCsmUsdTsmU | |
| | | 3464_as | | | sdCsmAsdTsmUsdGs | |
| | | | | | mUsdGsmGsdG | |
| 379 | TTAGAACTCT | NM_00524 | 2 | −8.4 | mUsdTsmAsdGsmAsd | 763 |
| | TTCATTGTGG | 9.5_3446- | | | AsmCsdTsmCsdTsmU | |
| | | 3465_as | | | sdTsmCsdAsmUsdTsm | |
| | | | | | GsdTsmGsdG | |
| 380 | CTTTATTAGA | NM_00524 | 2 | −6.6 | mCsdTsmUsdTsmAsd | 764 |
| | ACTCTTTCAT | 9.5_3451- | | | TsmUsdAsmGsdAsmA | |
| | | 3470_as | | | sdCsmUsdCsmUsdTsm | |
| | | | | | UsdCsmAsdT | |
| 381 | ACATCTTTAT | NM_00524 | 2 | −10.7 | mAsdCsmAsdTsmCsd | 765 |
| | TAGAACTCTT | 9.5_3455- | | | TsmUsdTsmAsdTsmU | |
| | | 3474_as | | | sdAsmGsdAsmAsdCs | |
| | | | | | mUsdCsmUsdT | |
| 382 | GCACATCTTT | NM_00524 | 2 | −6.3 | mGsdCsmAsdCsmAsd | 766 |
| | ATTAGAACT | 9.5_3457- | | | TsmCsdTsmUsdTsmA | |
| | C | 3476_as | | | sdTsmUsdAsmGsdAs | |
| | | | | | mAsdCsmUsdC | |
| 383 | CAGCACATC | NM_00524 | 2 | −6.5 | mCsdAsmGsdCsmAsd | 767 |
| | TTTATTAGAA | 9.5_3459- | | | CsmAsdTsmCsdTsmU | |
| | C | 3478_as | | | sdTsmAsdTsmUsdAsm | |
| | | | | | GsdAsmAsdC | |
| 384 | TCAGCACAT | NM_00524 | 2 | −6.7 | mUsdCsmAsdGsmCsd | 768 |
| | CTTTATTAGA | 9.5_3460- | | | AsmCsdAsmUsdCsmU | |
| | A | 3479_as | | | sdTsmUsdAsmUsdTsm | |
| | | | | | AsdGsmAsdA | |

### Example 2: Cellular Modulation of FOXG1 Expression by ASOs

[0166] The designed antisense oligonucleotides (ASOs) targeting the 5′ and 3′ UTR region of a FOXG1 mRNA were tested for the ability to modulate (e.g. increase) FOXG1 expression in cells. In brief, cells were transfected with The ASOs of Table 1 ad Table 2, and the changes in FOXG1 mRNA were measured.

[0167] Cells:

[0168] HEK293 cells were obtained from ATCC (ATCC in partnership with LGC Standards, Wesel, Germany, cat. #ATCC-CRL-1573) and cultured in EMEM (#30-2003, ATCC in partnership with LGC Standards, Wesel, Germany), supplemented to contain 10% fetal calf serum (1248D, Biochrom GmbH, Berlin, Germany), and 100 U/ml Penicillin/100n/m1 Streptomycin (A2213, Biochrom GmbH, Berlin, Germany) at 37° C. in an atmosphere with 5% CO₂ in a humidified incubator. For transfection of HEK293 cells with ASOs, cells were seeded at a density of 15,000 cells/well into 96-well tissue culture plates (#655180, GBO, Germany).

[0169] Transfection of ASOs:

[0170] In HEK293 cells, transfection of ASOs was carried out with Lipofectamine2000 (Invitrogen/Life Technologies, Karlsruhe, Germany) according to manufacturer's instructions for reverse transfection with 0.5 μL Lipofectamine2000 per well.

[0171] The single dose screen was performed with ASOs in quadruplicates at 50 nM, with two ASOs targeting AHSA1 (one 2′-O-methoxyethyl (MOE) and one 2′-O-methyl (oMe) ASO) and a siRNA targeting RLuc as unspecific controls and a mock transfection. After 24h of incubation with ASOs, medium was removed and cells were lysed in 150111 Medium-Lysis Mixture (1 volume lysis mixture, 2 volumes cell culture medium) and then incubated at 53° C. for 30 minutes.

[0172] The two Ahsal-ASOs (one 2′-oMe-modified and one 2′-O-methoxyethyl (MOE MOE)-modified) served at the same time as unspecific controls for respective target mRNA expression and as a positive control to analyze transfection efficiency with regards to Ahsal mRNA level. By hybridization with an Ahsal probe set, the mock transfected wells served as controls for Ahsal mRNA level. Transfection efficiency for each 96-well plate and both doses in the dual dose screen were calculated by relating Ahsal-level with Ahsal-ASO (normalized to GapDH) to Ahsal-level obtained with mock controls.

[0173] Detection of FOXG1 mRNA:

[0174] QuantiGene detection was used to determine FOXG1 mRNA expression in cells lysates. In short, the QuantiGene assay directly measures target RNAs captured through probe hybridization and quantified through branched DNA technology that amplifies the signal. The signal is read using a Luminex or a luminometer for single targets. The assay measures RNA at the sample source, the assay avoids biases and variability inherent to extraction techniques and enzymatic manipulations. In addition, this direct measurement helps overcome issues with transcript degradation typically found in samples such as FFPE.

[0175] For the detection of FOXG1 mRNA, a Quantigene-Singleplex assay (1.0 for GapDH and 2.0 for FoxG1) was performed according to manufacturer's instructions (ThermoFisher, Germany). Luminescence was read using 1420 Luminescence Counter (WALLAC VICTOR Light, Perkin Elmer, Rodgau-Jtigesheim, Germany) following 30 minutes incubation at RT in the dark. The probe sets used for FOXG1 mRNA detection are set forth in Table 3 (Human FoxG1 QG2.0 probe set (Accession #NM_005249): Oligosequences “CEs” and “LEs” are depicted without the proprietary parts of their sequences. Cross reactivity with the cyno sequence was obtained by adding additional probes). Control GapDH probe sets are set forth in Table 5 (Human GapDH QG1.0 probe set (Accession #NM_002046): Oligosequences “CEs” and “LEs” are depicted without the proprietary parts of their sequences.).

TABLE 3
Human FoxG1 QG2.0 probe set (Accession #NM_005249)

| Oligo name | sequence 5′-3′ | accession#, position & function |
|---|---|---|
| QG2_hsFoxG1_1 | ggccagcttggcccg | NM 005249.1334.1348.LE |
| QG2_hsFoxG1 2 | gcgcaccgcgcttgaa | NM_005249.1349.1364.LE |
| QG2_hsFoxG1 3 | gccggtggaggtgaggc | NM_005249.1365.1381.CE |
| QG2_hsFoxG1_4 | cgcggtccatgaaggtgag | NM_005249.1382.1400.LE |
| QG2 hsFoxG1 5 | gccagtagagggagccgg | NM_005249.1401.1418.LE |
| QG2_hsFoxG1_6 | gacaggaagggcgacatgg | NM_005249.1419.1437.BL |
| QG2 hsFoxG1 7 | gcgggggtggtgcagg | NM_005249.1438.1453.BL |
| QG2_hsFoxG1_8 | tgtaactcaaagtgctgctggc | NM_005249.1454.1475.CE |
| QG2_hsFoxG1_9 | gccgacgtggtgccgt | NM_005249.1476.1491.LE |
| QG2_hsFoxG1_10 | atggggtggctggggtag | NM_005249.1492.1509.LE |
| QG2_hsFoxG1_11 | tcaacacggagctgtagggc | NM_005249.1510.1529.CE |
| QG2 hsFoxG1 12 | gttgcccagcgagttctgag | NM_005249.1530.1549.LE |
| QG2_hsFoxG1_13 | gcggtggagaaggagtggtt | NM_005249.1550.1569.LE |
| QG2 hsFoxG1 14 | ccacgctcaggccgttg | NM_005249.1570.1586.BL |
| QG2_hsFoxG1_15 | cccgttgaccagccggt | NM_005249.1587.1603.CE |
| QG2_hsFoxG1_16 | cgtggcgtacgggatctc | NM_005249.1604.1621.LE |
| QG2_hsFoxG1_17 | gcggccgtgaggtggtg | NM_005249.1622.1638.LE |
| QG2_hsFoxG1 18 | gaggcggctagcgcg | NM_005249.1639.1653.CE |
| QG2_hsFoxG1_19 | caggccgcagggcacc | NM_005249.1654.1669.LE |
| QG2_hsFoxG1 20 | ccagagcagggcaccga | NM_005249.1670.1686.LE |
| QG2_hsFoxG1 21 | caggggttgagggagtaggtc | NM_005249.1687.1707.CE |
| QG2_hsFoxG1 22 | gcgagcaggttgacggag | NM_005249.1708.1725.LE |
| QG2_hsFoxG1 23 | gaaaaagtaactggtctggccc | NM_005249.1726.1747.LE |
| QG2_hsFoxG1_24 | ggtgcgggacgtgggg | NM_005249.1748.1763.CE |
| QG2_hsFoxG1 25 | tgctctgcgaagtcattgacg | NM_005249.1764.1784.LE |
| QG2_hsFoxG1 26 | ggcgctcatggacgtgc | NM_005249.1785.1801.LE |
| QG2_hsFoxG1 27 | aggaggacgcggccct | NM_005249.1802.1817.CE |

TABLE 4
Human GapDH QG1.0 probe set (Accession #NM_002046)

| Oligo name | sequence 5′-3′ | accession#, position & function |
|---|---|---|
| QG1_hsGAP_1 | gaatttgccatgggtggaat | NM_002046.252.271.CE |
| QG1_hsGAP_2 | ggagggatctcgctcctgga | NM_002046.333.352.CE |
| QG1_hsGAP 3 | ccccagccttctccatggt | NM_002046.413.431.CE |
| QG1_hsGAP 4 | gctcccccctgcaaatgag | NM_002046.432.450.CE |
| QG1_hsGAP 5 | agccttgacggtgccatg | NM_002046.272.289.LE |
| QG1 hsGAP 6 | gatgacaagcttcccgttctc | NM_002046.290.310.LE |
| QG1_hsGAP 7 | agatggtgatgggatttccatt | NM_002046.311.332.LE |
| QG1_hsGAP_8 | gcatcgccccacttgatttt | NM_002046.353.372.LE |
| QG1_hsGAP_9 | cacgacgtactcagcgcca | NM_002046.373.391.LE |
| QG1_hsGAP_10 | ggcagagatgatgacccttttg | NM_002046.451.472.LE |
| QG1_hsGAP_11 | ggtgaagacgccagtggactc | NM_002046.392.412.BL |

[0176] Modulation of FOXG1 Expression by ASOs:

[0177] FIG. 2 shows FOXG1 mRNA expression data relative to mock transfection control. Each symbol (dot) indicates mean and standard error (bars). FoxG1 level as determined by linear model analysis. Oligos arranged in order of start position in FoxG1 mRNA (RefSeq NM_005249.5). Vertical dashed line indicates demarcation between 5′-UTR and 3′-UTR targeting oligos (left and right, respectively). The green line indicates 125% expression. Clusters 1 and 2, are indicated by purple boxes. The clusters are defined by 2 or more oligos sharing coordinate space and upregulating FoxG1>125%. For each well, the target mRNA level was normalized to the respective GAPDH mRNA level. Table 5 shows select sequences associated with the identified clusters. The activity of a given ASO was expressed as percent mRNA concentration of the respective target (normalized to GAPDH mRNA) in treated cells, relative to the target mRNA concentration (normalized to GAPDH mRNA) averaged across control wells (set as 100% target expression).

TABLE 5
ASO-mediated modulation of FOXG1 expression in cells

| | | | Mean % FoxG1 | |
|---|---|---|---|---|
| Oligo | Start | End | relative to Mock | Cluster |
| NM_005249.5_2061-2080_as | 2061 | 2080 | 145.58364 | 1 |
| (SEQ ID NO: 100) | | | | |
| NM_005249.5_2064-2083_as | 2064 | 2083 | 134.88537 | 1 |
| (SEQ ID NO: 103) | | | | |
| NM_005249.5_2965-2984_as | 2965 | 2984 | 126.46911 | 2 |
| (SEQ ID NO: 284) | | | | |
| NM_005249.5_2967-2986_as | 2967 | 2986 | 139.66475 | 2 |
| (SEQ ID NO: 286) | | | | |
| NM_005249.5_2968-2987_as | 2968 | 2987 | 135.56079 | 2 |
| (SEQ ID NO: 287) | | | | |
| NM_005249.5_2995-3014_as | 2995 | 3014 | 129.12053 | 2 |
| (SEQ ID NO: 288) | | | | |
| NM_005249.5_2996-3015_as | 2996 | 3015 | 136.41197 | 2 |
| (SEQ ID NO: 289) | | | | |

### Example 3: Cellular Modulation of FOXG1 Expression by Select ASOs in HEK293 Cells

[0178] The designed antisense oligonucleotides (ASOs) targeting a FOXG1 mRNA were further tested for the ability to modulate (e.g. increase) FOXG1 expression in cells. In brief, cells were transfected with The ASOs of Table 6, and the changes in FOXG1 mRNA were measured.

[0179] Transfection of ASOs and FOXG1 Quantification:

[0180] In HEK293 cells, transfection was performed with ASOs at concentrations of 50 nM and 10 nM in replicate. After 24h of incubation with ASOs, medium was removed, the cells were lysed, and QuantiGene detection was used to determine FOXG1 mRNA expression in cells lysates.

[0181] Modulation of FOXG1 Expression by ASOs:

[0182] FIG. 3 shows FOXG1 mRNA expression modulation of selected 2′-O-methoxyethyl (MOE) chemistry oligos in HEK293, relative to mean of mock transfection control. Each bar indicates the mean and standard error FOXG1 level. ASOs are arranged by and listed in order of start position in FOXG1 mRNA (RefSeq NM_005249.5). The green horizontal line indicates 125% expression. Clusters 1 and 2 also noted. Table 6 shows the ASO coverage of the FOXG1 mRNA and data associated with the modulation of FOXG1 expression.

TABLE 6
ASO-mediated up-regulation of FOXG1 mRNA in cells

| Oligo (Position | | Mean | |
|---|---|---|---|
| in FOXG1 mRNA) | Dose | Expression | SEM |
| NM_005249.5_2061-2080 | 50 nM | 189.7648 | 7.739995 |
| NM_005249.5_2062-2081 | 50 nM | 192.3423 | 10.95742 |
| NM_005249.5_2063-2082 | 50 nM | 164.8299 | 7.865033 |
| NM_005249.5_2064-2083 | 50 nM | 127.9935 | 4.398258 |
| NM_005249.5_2065-2084 | 50 nM | 117.7618 | 3.856764 |
| NM_005249.5_2961-2980 | 50 nM | 112.9502 | 2.841189 |
| NM_005249.5_2962-2981 | 50 nM | 114.7827 | 4.184544 |
| NM_005249.5_2963-2982 | 50 nM | 109.707 | 0.913357 |
| NM_005249.5_2964-2983 | 50 nM | 114.5229 | 2.913248 |
| NM_005249.5_2965-2984 | 50 nM | 131.6638 | 5.676781 |
| NM_005249.5_2966-2985 | 50 nM | 129.4804 | 1.851186 |
| NM_005249.5_2967-2986 | 50 nM | 128.9098 | 2.447689 |
| NM_005249.5_2968-2987 | 50 nM | 107.1351 | 1.832585 |
| NM_005249.5_2969-2988 | 50 nM | 94.31892 | 1.188665 |
| NM_005249.5_2970-2989 | 50 nM | 123.675 | 1.774876 |
| NM_005249.5_2971-2990 | 50 nM | 92.11175 | 1.043745 |
| NM_005249.5_2973-2992 | 50 nM | 85.85752 | 3.003942 |
| NM_005249.5_2976-2995 | 50 nM | 76.77638 | 1.550449 |
| NM_005249.5_2977-2996 | 50 nM | 84.87921 | 1.6896 |
| NM_005249.5_2978-2997 | 50 nM | 102.624 | 1.407233 |
| NM_005249.5_2983-3002 | 50 nM | 109.6413 | 1.645209 |
| NM_005249.5_2984-3003 | 50 nM | 108.0409 | 2.905723 |
| NM_005249.5_2985-3004 | 50 nM | 104.6014 | 3.465679 |
| NM_005249.5_2986-3005 | 50 nM | 83.09921 | 1.444432 |
| NM_005249.5_2987-3006 | 50 nM | 77.87864 | 2.458964 |
| NM_005249.5_2990-3009 | 50 nM | 91.60617 | 3.409702 |
| NM_005249.5_2991-3010 | 50 nM | 119.3121 | 3.504208 |
| NM_005249.5_2992-3011 | 50 nM | 106.3858 | 4.279597 |
| NM_005249.5_2993-3012 | 50 nM | 110.7718 | 4.264335 |
| NM_005249.5_2994-3013 | 50 nM | 125.111 | 3.311955 |
| NM_005249.5_2995-3014 | 50 nM | 123.881 | 5.910818 |
| NM_005249.5_2996-3015 | 50 nM | 125.3415 | 5.550329 |
| NM_005249.5_2997-3016 | 50 nM | 119.9982 | 2.415439 |
| NM_005249.5_2998-3017 | 50 nM | 119.8153 | 2.011818 |
| NM_005249.5_2999-3018 | 50 nM | 100.3009 | 2.463369 |
| NM_005249.5_3000-3019 | 50 nM | 110.0815 | 3.525977 |
| NM_005249.5_2061-2080 | 10 nM | 140.8695 | 5.409641 |
| NM_005249.5_2062-2081 | 10 nM | 148.9523 | 4.47351 |
| NM_005249.5_2063-2082 | 10 nM | 149.4905 | 2.028402 |
| NM_005249.5_2064-2083 | 10 nM | 135.3995 | 6.766115 |
| NM_005249.5_2065-2084 | 10 nM | 128.6393 | 3.486294 |
| NM_005249.5_2961-2980 | 10 nM | 128.9611 | 4.7843 |
| NM_005249.5_2962-2981 | 10 nM | 134.9864 | 5.806415 |
| NM_005249.5_2963-2982 | 10 nM | 140.5912 | 4.537928 |
| NM_005249.5_2964-2983 | 10 nM | 118.3183 | 5.061172 |
| NM_005249.5_2965-2984 | 10 nM | 124.083 | 9.098639 |
| NM_005249.5_2966-2985 | 10 nM | 113.5794 | 1.977667 |
| NM_005249.5_2967-2986 | 10 nM | 108.0511 | 0.430458 |
| NM_005249.5_2968-2987 | 10 nM | 114.3724 | 9.577348 |
| NM_005249.5_2969-2988 | 10 nM | 108.5649 | 3.977983 |
| NM_005249.5_2970-2989 | 10 nM | 108.5442 | 3.768629 |
| NM_005249.5_2971-2990 | 10 nM | 104.7672 | 2.365784 |
| NM_005249.5_2973-2992 | 10 nM | 108.0177 | 5.491231 |
| NM_005249.5_2976-2995 | 10 nM | 114.5418 | 7.586278 |
| NM_005249.5_2977-2996 | 10 nM | 132.8276 | 2.279475 |
| NM_005249.5_2978-2997 | 10 nM | 138.4885 | 6.397771 |
| NM_005249.5_2983-3002 | 10 nM | 128.7813 | 2.926409 |
| NM_005249.5_2984-3003 | 10 nM | 129.6681 | 4.946237 |
| NM_005249.5_2985-3004 | 10 nM | 124.5868 | 3.105648 |
| NM_005249.5_2986-3005 | 10 nM | 118.2728 | 4.379385 |
| NM_005249.5_2987-3006 | 10 nM | 125.4329 | 3.341276 |
| NM_005249.5_2990-3009 | 10 nM | 122.72 | 3.189793 |
| NM_005249.5_2991-3010 | 10 nM | 126.7657 | 2.150985 |
| NM_005249.5_2992-3011 | 10 nM | 113.4971 | 3.562776 |
| NM_005249.5_2993-3012 | 10 nM | 121.0352 | 3.209476 |
| NM_005249.5_2994-3013 | 10 nM | 123.4705 | 3.868376 |
| NM_005249.5_2995-3014 | 10 nM | 112.2469 | 4.423879 |
| NM_005249.5_2996-3015 | 10 nM | 113.204 | 0.847541 |
| NM_005249.5_2997-3016 | 10 nM | 111.7264 | 3.5779 |
| NM_005249.5_2998-3017 | 10 nM | 108.964 | 2.369043 |
| NM_005249.5_2999-3018 | 10 nM | 115.8594 | 2.530501 |
| NM_005249.5_3000-3019 | 10 nM | 119.797 | 4.63932 |

### Example 4: Cellular Modulation of FOXG1 Expression by Select ASOs in CFF-STTG1 and SW1783 Cells

[0183] The designed antisense oligonucleotides (ASOs) targeting a FOXG1 mRNA were tested for the ability to modulate (e.g. increase) FOXG1 expression in brain tissue-derived cells. In brief, cells were transfected with to ASOs of Table 7, and the changes in FOXG1 mRNA were measured.

[0184] Transfection of ASOs and FOXG1 Quantification:

[0185] In CFF-STTG1 and SW1783 cells, transfection was performed with ASOs at concentrations of 50 nM and 10 nM, in replicate. After 24h of incubation with ASOs, medium was removed, the cells were lysed, and QuantiGene detection was used to determine FOXG1 mRNA expression in cells lysates.

[0186] Modulation of FOXG1 Expression by ASOs:

[0187] FIG. 4A shows FOXG1 mRNA expression modulation of selected 2′-O-methoxyethyl (MOE) chemistry oligos in CFF-STTG1 cells, relative to mean of mock transfection and nonspecific oligo controls. FIG. 4B shows FOXG1 mRNA expression modulation of selected oligos in SW1783 cells, relative to mean of mock transfection and nonspecific oligo controls. For both FIG. 4A and FIG. 4B, each bar indicates mean and standard error FOXG1 level and ASOs are arranged by and listed in order of start position in FOXG1 mRNA (RefSeq NM_005249.5). The green horizontal line indicates 125% expression and clusters 1-2 are noted. Table 7 shows ASO coverage of the FOXG1 mRNA and data associated with the modulation of FOXG1 expression in CFF-STTG1 and SW1783 cell lines.

TABLE 7
ASO-mediated upregulation of FOXG1 mRNA in CFF-STTG1 and SW1783 cells

| Oligo | | | Mean | |
|---|---|---|---|---|
| (Position in FoxG1 mRNA) | Cell Line | Dose | Expression | SEM |
| NM_005249.5_2061-2080_as | CFF-STTG1 | 50 nM | 2.09060354 | 0.0524632 |
| NM_005249.5_2064-2083_as | CFF-STTG1 | 50 nM | 1.78106746 | 0.02497863 |
| NM_005249.5_2965-2984_as | CFF-STTG1 | 50 nM | 1.40656881 | 0.06326815 |
| NM_005249.5_2967-2986_as | CFF-STTG1 | 50 nM | 1.14106306 | 0.06401273 |
| NM_005249.5_2968-2987_as | CFF-STTG1 | 50 nM | 1.01822144 | 0.05812383 |
| NM_005249.5_2995-3014_as | CFF-STTG1 | 50 nM | 1.0966339 | 0.00706128 |
| NM_005249.5_2996-3015_as | CFF-STTG1 | 50 nM | 1.17138666 | 0.04592333 |
| NM_005249.5_2061-2080_as | CFF-STTG1 | 10 nM | 1.11463161 | 0.01828397 |
| NM_005249.5_2064-2083_as | CFF-STTG1 | 10 nM | 1.08309632 | 0.04509828 |
| NM_005249.5_2965-2984_as | CFF-STTG1 | 10 nM | 1.05531127 | 0.02590015 |
| NM_005249.5_2967-2986_as | CFF-STTG1 | 10 nM | 1.11894287 | 0.03515521 |
| NM_005249.5_2968-2987_as | CFF-STTG1 | 10 nM | 1.11193636 | 0.02863519 |
| NM_005249.5_2995-3014_as | CFF-STTG1 | 10 nM | 1.14476513 | 0.0331245 |
| NM_005249.5_2996-3015_as | CFF-STTG1 | 10 nM | 1.17782235 | 0.00312998 |
| NM_005249.5_2061-2080_as | SW1783 | 50 nM | 1.41432605 | 0.02330619 |
| NM_005249.5_2064-2083_as | SW1783 | 50 nM | 1.37415916 | 0.01947226 |
| NM_005249.5_2965-2984_as | SW1783 | 50 nM | 1.43663656 | 0.03060538 |
| NM_005249.5_2967-2986_as | SW1783 | 50 nM | 1.34452967 | 0.02806401 |
| NM_005249.5_2968-2987_as | SW1783 | 50 nM | 1.35678534 | 0.0400883 |
| NM_005249.5_2995-3014_as | SW1783 | 50 nM | 1.23298541 | 0.04153227 |
| NM_005249.5_2996-3015_as | SW1783 | 50 nM | 1.46154338 | 0.02879713 |
| NM_005249.5_2061-2080_as | SW1783 | 10 nM | 1.29423388 | 0.04532559 |
| NM_005249.5_2064-2083_as | SW1783 | 10 nM | 1.31686659 | 0.01826147 |
| NM_005249.5_2965-2984_as | SW1783 | 10 nM | 1.15913468 | 0.04184637 |
| NM_005249.5_2967-2986_as | SW1783 | 10 nM | 1.17039018 | 0.05614856 |
| NM_005249.5_2968-2987_as | SW1783 | 10 nM | 1.17738434 | 0.01821765 |
| NM_005249.5_2995-3014_as | SW1783 | 10 nM | 1.18240062 | 0.01173471 |
| NM_005249.5_2996-3015_as | SW1783 | 10 nM | 1.195674 | 0.02501848 |

[0188] While preferred embodiments of the present disclosure have been shown and described herein, it will be obvious to those skilled in the art that such embodiments are provided by way of example only. Numerous variations, changes, and substitutions will now occur to those skilled in the art without departing from the present disclosure. It should be understood that various alternatives to the embodiments of the present disclosure described herein may be employed in practicing the present disclosure. It is intended that the following claims define the scope of the present disclosure and that methods and structures within the scope of these claims and their equivalents be covered thereby.

SEQUENCES

| SEQ ID NO | SEQUENCE |
|---|---|
| 1 | AGCGATCGAGGCGGCTATAG |
| 2 | CAGCGATCGAGGCGGCTATA |
| 3 | ACAGCGATCGAGGCGGCTAT |
| 4 | GACAGCGATCGAGGCGGCTA |
| 5 | AGACAGCGATCGAGGCGGCT |
| 6 | GCAGCAGTCACAGCAGCAGC |
| 7 | CGCAGCAGCAGTCACAGCAG |
| 8 | TCGCAGCAGCAGTCACAGCA |
| 9 | CTCGCAGCAGCAGTCACAGC |
| 10 | TCTCGCAGCAGCAGTCACAG |
| 11 | CTCTCGCAGCAGCAGTCACA |
| 12 | CCTCTCGCAGCAGCAGTCAC |
| 13 | TCCTCTCGCAGCAGCAGTCA |
| 14 | CTCCTCTCGCAGCAGCAGTC |
| 15 | CCTCCTCTCGCAGCAGCAGT |
| 16 | TCCTCCTCTCGCAGCAGCAG |
| 17 | CTCCTCCTCTCGCAGCAGCA |
| 18 | TCCTCCTCCTCTCGCAGCAG |
| 19 | CTCCTCCTCCTCTCGCAGCA |
| 20 | TCCTCCTCCTCCTCTCGCAG |
| 21 | CTCCTCCTCCTCCTCTCGCA |
| 22 | GCTGCTTCCTCCTCCTCCTC |
| 23 | CGCTGCTTCCTCCTCCTCCT |
| 24 | TGTACTTCTTGGTCTCCCCC |
| 25 | CTGTACTTCTTGGTCTCCCC |
| 26 | ACTGTACTTCTTGGTCTCCC |
| 27 | AACTGTACTTCTTGGTCTCC |
| 28 | CAACTGTACTTCTTGGTCTC |
| 29 | CCAACTGTACTTCTTGGTCT |
| 30 | CCCAACTGTACTTCTTGGTC |
| 31 | TCCCAACTGTACTTCTTGGT |
| 32 | CTCCCAACTGTACTTCTTGG |
| 33 | GCTCCCAACTGTACTTCTTG |
| 34 | CGCTCCCAACTGTACTTCTT |
| 35 | TCGCTCCCAACTGTACTTCT |
| 36 | CTCGCTCCCAACTGTACTTC |
| 37 | CCTCGCTCCCAACTGTACTT |
| 38 | CCCTCGCTCCCAACTGTACT |
| 39 | TCCCTCGCTCCCAACTGTAC |
| 40 | CTCCCTCGCTCCCAACTGTA |
| 41 | GCTCCCTCGCTCCCAACTGT |
| 42 | AGCTCCCTCGCTCCCAACTG |
| 43 | AAGCTCCCTCGCTCCCAACT |
| 44 | GAAGCTCCCTCGCTCCCAAC |
| 45 | TGAAGCTCCCTCGCTCCCAA |
| 46 | GTGAAGCTCCCTCGCTCCCA |
| 47 | AAGAAACAACCACCGCCCCG |
| 48 | AAAGAAACAACCACCGCCCC |
| 49 | AAAAGAAACAACCACCGCCC |
| 50 | AAAAAGAAACAACCACCGCC |
| 51 | CCCCTCAGGAATTAGAAAAA |
| 52 | ACCCCTCAGGAATTAGAAAA |
| 53 | CACCCCTCAGGAATTAGAAA |
| 54 | CCACCCCTCAGGAATTAGAA |
| 55 | ACCACCCCTCAGGAATTAGA |
| 56 | AACCACCCCTCAGGAATTAG |
| 57 | CAACCACCCCTCAGGAATTA |
| 58 | GCAACCACCCCTCAGGAATT |
| 59 | AGCAACCACCCCTCAGGAAT |
| 60 | CAGCAACCACCCCTCAGGAA |
| 61 | GCAGCAACCACCCCTCAGGA |
| 62 | AAGCAGCAACCACCCCTCAG |
| 63 | AAAGCAGCAACCACCCCTCA |
| 64 | AAAAGCAGCAACCACCCCTC |
| 65 | CAAAAGCAGCAACCACCCCT |
| 66 | GCAAAAGCAGCAACCACCCC |
| 67 | AGCAAAAGCAGCAACCACCC |
| 68 | TAGCAAAAGCAGCAACCACC |
| 69 | GTAGCAAAAGCAGCAACCAC |
| 70 | TGTAGCAAAAGCAGCAACCA |
| 71 | ATGTAGCAAAAGCAGCAACC |
| 72 | CATGTAGCAAAAGCAGCAAC |
| 73 | TCATGTAGCAAAAGCAGCAA |
| 74 | GTCATGTAGCAAAAGCAGCA |
| 75 | AGTCATGTAGCAAAAGCAGC |
| 76 | AAGTCATGTAGCAAAAGCAG |
| 77 | CAAGTCATGTAGCAAAAGCA |
| 78 | GCAAGTCATGTAGCAAAAGC |
| 79 | GGCAAGTCATGTAGCAAAAG |
| 80 | TGGCAAGTCATGTAGCAAAA |
| 81 | CTGGCAAGTCATGTAGCAAA |
| 82 | GCTGGCAAGTCATGTAGCAA |
| 83 | CGCTGGCAAGTCATGTAGCA |
| 84 | GCGCTGGCAAGTCATGTAGC |
| 85 | TCACTTACAGTCTGGTCCCA |
| 86 | TTCACTTACAGTCTGGTCCC |
| 87 | ACGTTCACTTACAGTCTGGT |
| 88 | GTGTAAAACGTTCACTTACA |
| 89 | TGTGTAAAACGTTCACTTAC |
| 90 | GTGTGTAAAACGTTCACTTA |
| 91 | TGTGTGTAAAACGTTCACTT |
| 92 | TGCAAATGTGTGTAAAACGT |
| 93 | ATGCAAATGTGTGTAAAACG |
| 94 | AATGCAAATGTGTGTAAAAC |
| 95 | CAATGCAAATGTGTGTAAAA |
| 96 | TTTACAATGCAAATGTGTGT |
| 97 | AAATACCTGGACTTATTTTT |
| 98 | AAAATACCTGGACTTATTTT |
| 99 | AAAAATACCTGGACTTATTT |
| 100 | AACGTACAGAAATGGGAGGG |
| 101 | AAACGTACAGAAATGGGAGG |
| 102 | CAAACGTACAGAAATGGGAG |
| 103 | ACAAACGTACAGAAATGGGA |
| 104 | AACAAACGTACAGAAATGGG |
| 105 | GAACAAACGTACAGAAATGG |
| 106 | CACTCCACACCTTGTTAGAA |
| 107 | ACACTCCACACCTTGTTAGA |
| 108 | GACACTCCACACCTTGTTAG |
| 109 | TCGCTGACACTCCACACCTT |
| 110 | GTATTCTCCCCACATTGCAC |
| 111 | TGTATTCTCCCCACATTGCA |
| 112 | ATGTATTCTCCCCACATTGC |
| 113 | ACAATGTATTCTCCCCACAT |
| 114 | TTGACTTCCAAACCTTATAT |
| 115 | TTTGACTTCCAAACCTTATA |
| 116 | CTACTATAATTTGACTTCCA |
| 117 | TCTACTATAATTTGACTTCC |
| 118 | TTCTACTATAATTTGACTTC |
| 119 | CATTCTACTATAATTTGACT |
| 120 | ACATTCTACTATAATTTGAC |
| 121 | GATACACATTCTACTATAAT |
| 122 | AGATACACATTCTACTATAA |
| 123 | TAGATACACATTCTACTATA |
| 124 | TTAGATACACATTCTACTAT |
| 125 | TTTAGATACACATTCTACTA |
| 126 | ATTTAGATACACATTCTACT |
| 127 | TATTTAGATACACATTCTAC |
| 128 | CTATTTAGATACACATTCTA |
| 129 | CACTATTTAGATACACATTC |
| 130 | GTCACTATTTAGATACACAT |
| 131 | AGTCACTATTTAGATACACA |
| 132 | CAGTCACTATTTAGATACAC |
| 133 | AGCAGTCACTATTTAGATAC |
| 134 | AAGCAGTCACTATTTAGATA |
| 135 | AAAGCAGTCACTATTTAGAT |
| 136 | CAAAGCAGTCACTATTTAGA |
| 137 | GCAAAGCAGTCACTATTTAG |
| 138 | GGCAAAGCAGTCACTATTTA |
| 139 | TGGCAAAGCAGTCACTATTT |
| 140 | AATGGCAAAGCAGTCACTAT |
| 141 | AAATGGCAAAGCAGTCACTA |
| 142 | GAAATGGCAAAGCAGTCACT |
| 143 | AATGAAATGGCAAAGCAGTC |
| 144 | AGGTTTGAATGAAATGGCAA |
| 145 | CAGGTTTGAATGAAATGGCA |
| 146 | TCAGGTTTGAATGAAATGGC |
| 147 | GTCAGGTTTGAATGAAATGG |
| 148 | CTTGTCAGGTTTGAATGAAA |
| 149 | CTTAGAGATAGACTTGTCAG |
| 150 | TCTTAGAGATAGACTTGTCA |
| 151 | CTCTTAGAGATAGACTTGTC |
| 152 | GCTCTTAGAGATAGACTTGT |
| 153 | GGCTCTTAGAGATAGACTTG |
| 154 | CGGCTCTTAGAGATAGACTT |
| 155 | GCGGCTCTTAGAGATAGACT |
| 156 | TGGCGGCTCTTAGAGATAGA |
| 157 | TCTGGCGGCTCTTAGAGATA |
| 158 | ATCTGGCGGCTCTTAGAGAT |
| 159 | AATCTGGCGGCTCTTAGAGA |
| 160 | TACTGCACACATGGAAATCT |
| 161 | ATACTGCACACATGGAAATC |
| 162 | AATACTGCACACATGGAAAT |
| 163 | ATAATACTGCACACATGGAA |
| 164 | CTTATAATACTGCACACATG |
| 165 | AACTTATAATACTGCACACA |
| 166 | TAACTTATAATACTGCACAC |
| 167 | ATAACTTATAATACTGCACA |
| 168 | GATAACTTATAATACTGCAC |
| 169 | TGATAACTTATAATACTGCA |
| 170 | ATGATAACTTATAATACTGC |
| 171 | GTTCCATGATAACTTATAAT |
| 172 | AGTTCCATGATAACTTATAA |
| 173 | TAGTTCCATGATAACTTATA |
| 174 | ATAGTTCCATGATAACTTAT |
| 175 | TATAGTTCCATGATAACTTA |
| 176 | TCTGCGTCCACCATATAGTT |
| 177 | GTCTGCGTCCACCATATAGT |
| 178 | GGTCTGCGTCCACCATATAG |
| 179 | AGGTCTGCGTCCACCATATA |
| 180 | AAGGTCTGCGTCCACCATAT |
| 181 | TTCTCAAGGTCTGCGTCCAC |
| 182 | GTTCTCAAGGTCTGCGTCCA |
| 183 | TGTTCTCAAGGTCTGCGTCC |
| 184 | TTGTTCTCAAGGTCTGCGTC |
| 185 | GTTGTTCTCAAGGTCTGCGT |
| 186 | GGTTGTTCTCAAGGTCTGCG |
| 187 | AGGTTGTTCTCAAGGTCTGC |
| 188 | TAGGTTGTTCTCAAGGTCTG |
| 189 | TTAGGTTGTTCTCAAGGTCT |
| 190 | TTTAGGTTGTTCTCAAGGTC |
| 191 | AATTTAGGTTGTTCTCAAGG |
| 192 | CCCATAATTTAGGTTGTTCT |
| 193 | CCCCATAATTTAGGTTGTTC |
| 194 | TCCCCATAATTTAGGTTGTT |
| 195 | CTCCCCATAATTTAGGTTGT |
| 196 | TCTCCCCATAATTTAGGTTG |
| 197 | AAATTCTCCCCATAATTTAG |
| 198 | CAATAAATGGCCAAAATAAT |
| 199 | TCTTTGGTCTAAAAGTAAAC |
| 200 | ATCTTTGGTCTAAAAGTAAA |
| 201 | AATCTTTGGTCTAAAAGTAA |
| 202 | CAATCTTTGGTCTAAAAGTA |
| 203 | TTTCTAGAACCCAATCTTTG |
| 204 | CATTTTCTAGAACCCAATCT |
| 205 | GCATTTTCTAGAACCCAATC |
| 206 | TGCATTTTCTAGAACCCAAT |
| 207 | GTGCATTTTCTAGAACCCAA |
| 208 | AGTGCATTTTCTAGAACCCA |
| 209 | CAAGTGCATTTTCTAGAACC |
| 210 | CCAAGTGCATTTTCTAGAAC |
| 211 | ACCAAGTGCATTTTCTAGAA |
| 212 | TACCAAGTGCATTTTCTAGA |
| 213 | ATACCAAGTGCATTTTCTAG |
| 214 | TATACCAAGTGCATTTTCTA |
| 215 | GTATACCAAGTGCATTTTCT |
| 216 | AGTATACCAAGTGCATTTTC |
| 217 | TAGTATACCAAGTGCATTTT |
| 218 | TTAGTATACCAAGTGCATTT |
| 219 | ACTTAGTATACCAAGTGCAT |
| 220 | TACTTAGTATACCAAGTGCA |
| 221 | ATACTTAGTATACCAAGTGC |
| 222 | AATACTTAGTATACCAAGTG |
| 223 | GTTTTAATACTTAGTATACC |
| 224 | AGTGTTGCCAACTGAAACAA |
| 225 | CAATTGAATGGGCAGTGTTG |
| 226 | TCAATTGAATGGGCAGTGTT |
| 227 | TTCAATTGAATGGGCAGTGT |
| 228 | TGAAGGCAATCGTTAATTTT |
| 229 | CTGAAGGCAATCGTTAATTT |
| 230 | ACTGAAGGCAATCGTTAATT |
| 231 | AACTGAAGGCAATCGTTAAT |
| 232 | AAACTGAAGGCAATCGTTAA |
| 233 | CAAACTGAAGGCAATCGTTA |
| 234 | ACAAACTGAAGGCAATCGTT |
| 235 | ACACAAACTGAAGGCAATCG |
| 236 | GTGACCACATACATCAAAAT |
| 237 | TTAGTGACCACATACATCAA |
| 238 | TTTACCTATAAGTACAATAG |
| 239 | GTTTACCTATAAGTACAATA |
| 240 | GGTTTACCTATAAGTACAAT |
| 241 | ACATATTTGCAAGGTTTACC |
| 242 | TACATATTTGCAAGGTTTAC |
| 243 | TTACATATTTGCAAGGTTTA |
| 244 | GTTACATATTTGCAAGGTTT |
| 245 | GGTTACATATTTGCAAGGTT |
| 246 | AGGTTACATATTTGCAAGGT |
| 247 | CAGGTTACATATTTGCAAGG |
| 248 | ACAGGTTACATATTTGCAAG |
| 249 | ACACAGGTTACATATTTGCA |
| 250 | AACACAGGTTACATATTTGC |
| 251 | GCAACACAGGTTACATATTT |
| 252 | GCGCAACACAGGTTACATAT |
| 253 | TGCGCAACACAGGTTACATA |
| 254 | TTGCGCAACACAGGTTACAT |
| 255 | TTTGCGCAACACAGGTTACA |
| 256 | CATTTGCGCAACACAGGTTA |
| 257 | ACTCAAATTTATGCGGCATT |
| 258 | ATCACTCAAATTTATGCGGC |
| 259 | ACATTAACAATCACTCAAAT |
| 260 | CAACATTAACAATCACTCAA |
| 261 | ACAACATTAACAATCACTCA |
| 262 | GACAACATTAACAATCACTC |
| 263 | AGACAACATTAACAATCACT |
| 264 | ACCACAGTATCACAATCAAG |
| 265 | GACCACAGTATCACAATCAA |
| 266 | TGACCACAGTATCACAATCA |
| 267 | ATGACCACAGTATCACAATC |
| 268 | CATATGACCACAGTATCACA |
| 269 | GCATATGACCACAGTATCAC |
| 270 | GACAAACACGGGCATATGAC |
| 271 | TGACAAACACGGGCATATGA |
| 272 | GTTCATAGTAAACATTTTTG |
| 273 | GTGTTCATAGTAAACATTTT |
| 274 | TGTGTTCATAGTAAACATTT |
| 275 | TCTGTGTGTTCATAGTAAAC |
| 276 | TTCTGTGTGTTCATAGTAAA |
| 277 | TATTTCTGTGTGTTCATAGT |
| 278 | GATATATATGAATTTAGCCT |
| 279 | AGATATATATGAATTTAGCC |
| 280 | AGACAAAAGTATCAAGATAT |
| 281 | AGTTGATTGGTCTTTAAAAA |
| 282 | CCCTATAAGTTGATTGGTCT |
| 283 | AAAAAGCCTTTGAATTCCCT |
| 284 | TAAATTTTAGTTTGGCTGAA |
| 285 | TTAAATTTTAGTTTGGCTGA |
| 286 | TTTAAATTTTAGTTTGGCTG |
| 287 | GTTTAAATTTTAGTTTGGCT |
| 288 | TTAGAGTCAGTTCAAATTAA |
| 289 | TTTAGAGTCAGTTCAAATTA |
| 290 | TTTTAGAGTCAGTTCAAATT |
| 291 | TCATTTTTAGAGTCAGTTCA |
| 292 | TTCATTTTTAGAGTCAGTTC |
| 293 | GTTCACAAAGGGAAAAATAC |
| 294 | CTGCTCCTTGTAAAATTTGT |
| 295 | GCTGCTCCTTGTAAAATTTG |
| 296 | TGTTTATTAAATAGGCTGCT |
| 297 | GTGTTTATTAAATAGGCTGC |
| 298 | TAGTGTTTATTAAATAGGCT |
| 299 | CTAGTGTTTATTAAATAGGC |
| 300 | GCTAGTGTTTATTAAATAGG |
| 301 | AAAGCCTATACTTTGTTTAA |
| 302 | TCAGCTGAAAAGCCTATACT |
| 303 | ATCAGCTGAAAAGCCTATAC |
| 304 | TATCAGCTGAAAAGCCTATA |
| 305 | GTATCAGCTGAAAAGCCTAT |
| 306 | GGTATCAGCTGAAAAGCCTA |
| 307 | TGTATATCCACAGAAACTTA |
| 308 | CTTTTTGCTGTATATCCACA |
| 309 | TCTTTTTGCTGTATATCCAC |
| 310 | CTCTTTTTGCTGTATATCCA |
| 311 | TCTCTTTTTGCTGTATATCC |
| 312 | ATCTCTTTTTGCTGTATATC |
| 313 | ATATCTCTTTTTGCTGTATA |
| 314 | TATATCTCTTTTTGCTGTAT |
| 315 | TTATATCTCTTTTTGCTGTA |
| 316 | ATTATATCTCTTTTTGCTGT |
| 317 | AATTATATCTCTTTTTGCTG |
| 318 | GGTAAAGAGCTATGCACAGA |
| 319 | GGGTAAAGAGCTATGCACAG |
| 320 | AGGGTAAAGAGCTATGCACA |
| 321 | CAGGGTAAAGAGCTATGCAC |
| 322 | ACAGGGTAAAGAGCTATGCA |
| 323 | AACACAGGGTAAAGAGCTAT |
| 324 | GCCAAGCTCTATTAACAATA |
| 325 | TGCCAAGCTCTATTAACAAT |
| 326 | TTGCCAAGCTCTATTAACAA |
| 327 | TTTGCCAAGCTCTATTAACA |
| 328 | ATAATTTGCCAAGCTCTATT |
| 329 | TATAATTTGCCAAGCTCTAT |
| 330 | TTATAATTTGCCAAGCTCTA |
| 331 | ATTTATAATTTGCCAAGCTC |
| 332 | TATTTATAATTTGCCAAGCT |
| 333 | TTATTTATAATTTGCCAAGC |
| 334 | ACTTCTATCTAACCATATAC |
| 335 | GTCACTTCTATCTAACCATA |
| 336 | AGTCACTTCTATCTAACCAT |
| 337 | TAGTCACTTCTATCTAACCA |
| 338 | ATAGTCACTTCTATCTAACC |
| 339 | TATAGTCACTTCTATCTAAC |
| 340 | TTATAGTCACTTCTATCTAA |
| 341 | ATTATAGTCACTTCTATCTA |
| 342 | CATTATAGTCACTTCTATCT |
| 343 | GCATTATAGTCACTTCTATC |
| 344 | TGCATTATAGTCACTTCTAT |
| 345 | GTGCATTATAGTCACTTCTA |
| 346 | GGGCTCTGTGTGTCTATATA |
| 347 | AGGGCTCTGTGTGTCTATAT |
| 348 | AAGGGCTCTGTGTGTCTATA |
| 349 | GAAGGGCTCTGTGTGTCTAT |
| 350 | TGAAGGGCTCTGTGTGTCTA |
| 351 | ACTGAAGGGCTCTGTGTGTC |
| 352 | GAACTGAAGGGCTCTGTGTG |
| 353 | TGAACTGAAGGGCTCTGTGT |
| 354 | CTGAACTGAAGGGCTCTGTG |
| 355 | CCTGAACTGAAGGGCTCTGT |
| 356 | AAATTGTACCTGAACTGAAG |
| 357 | CAAATTGTACCTGAACTGAA |
| 358 | GCAAATTGTACCTGAACTGA |
| 359 | CGCAAATTGTACCTGAACTG |
| 360 | GCGCAAATTGTACCTGAACT |
| 361 | ATAAATGCTGACTTAGAAAG |
| 362 | AAATAAATGCTGACTTAGAA |
| 363 | AAAATAAATGCTGACTTAGA |
| 364 | GTGGGTAAACAGCCACAAAA |
| 365 | TGTGGGTAAACAGCCACAAA |
| 366 | ATTGTGGGTAAACAGCCACA |
| 367 | CATTGTGGGTAAACAGCCAC |
| 368 | TCATTGTGGGTAAACAGCCA |
| 369 | TTCATTGTGGGTAAACAGCC |
| 370 | TTTCATTGTGGGTAAACAGC |
| 371 | CTTTCATTGTGGGTAAACAG |
| 372 | TCTTTCATTGTGGGTAAACA |
| 373 | CTCTTTCATTGTGGGTAAAC |
| 374 | ACTCTTTCATTGTGGGTAAA |
| 375 | AACTCTTTCATTGTGGGTAA |
| 376 | GAACTCTTTCATTGTGGGTA |
| 377 | AGAACTCTTTCATTGTGGGT |
| 378 | TAGAACTCTTTCATTGTGGG |
| 379 | TTAGAACTCTTTCATTGTGG |
| 380 | CTTTATTAGAACTCTTTCAT |
| 381 | ACATCTTTATTAGAACTCTT |
| 382 | GCACATCTTTATTAGAACTC |
| 383 | CAGCACATCTTTATTAGAAC |
| 384 | TCAGCACATCTTTATTAGAA |

The application's sequence listing, which the Patent Office published only in electronic form, follows.

SEQUENCE LISTING (806 sequences)

SEQ ID NO: 1 - DNA, 20 bp, synthetic construct
  misc_feature 1..20: note = Description of Artificial Sequence: Synthetic oligonucleotide
  source 1..20: mol_type = other DNA
agcgatcgaggcggctatag

SEQ ID NO: 2 - DNA, 20 bp, synthetic construct
  misc_feature 1..20: note = Description of Artificial Sequence: Synthetic oligonucleotide
  source 1..20: mol_type = other DNA
cagcgatcgaggcggctata

SEQ ID NO: 3 - DNA, 20 bp, synthetic construct
  misc_feature 1..20: note = Description of Artificial Sequence: Synthetic oligonucleotide
  source 1..20: mol_type = other DNA
acagcgatcgaggcggctat

SEQ ID NO: 4 - DNA, 20 bp, synthetic construct
  misc_feature 1..20: note = Description of Artificial Sequence: Synthetic oligonucleotide
  source 1..20: mol_type = other DNA
gacagcgatcgaggcggcta

SEQ ID NO: 5 - DNA, 20 bp, synthetic construct
  misc_feature 1..20: note = Description of Artificial Sequence: Synthetic oligonucleotide
  source 1..20: mol_type = other DNA
agacagcgatcgaggcggct

SEQ ID NO: 6 - DNA, 20 bp, synthetic construct
  misc_feature 1..20: note = Description of Artificial Sequence: Synthetic oligonucleotide
  source 1..20: mol_type = other DNA
gcagcagtcacagcagcagc

SEQ ID NO: 7 - DNA, 20 bp, synthetic construct
  misc_feature 1..20: note = Description of Artificial Sequence: Synthetic oligonucleotide
  source 1..20: mol_type = other DNA
cgcagcagcagtcacagcag

SEQ ID NO: 8 - DNA, 20 bp, synthetic construct
  misc_feature 1..20: note = Description of Artificial Sequence: Synthetic oligonucleotide
  source 1..20: mol_type = other DNA
tcgcagcagcagtcacagca

SEQ ID NO: 9 - DNA, 20 bp, synthetic construct
  misc_feature 1..20: note = Description of Artificial Sequence: Synthetic oligonucleotide
  source 1..20: mol_type = other DNA
ctcgcagcagcagtcacagc

SEQ ID NO: 10 - DNA, 20 bp, synthetic construct
  misc_feature 1..20: note = Description of Artificial Sequence: Synthetic oligonucleotide
  source 1..20: mol_type = other DNA
tctcgcagcagcagtcacag

SEQ ID NO: 11 - DNA, 20 bp, synthetic construct
  misc_feature 1..20: note = Description of Artificial Sequence: Synthetic oligonucleotide
  source 1..20: mol_type = other DNA
ctctcgcagcagcagtcaca

SEQ ID NO: 12 - DNA, 20 bp, synthetic construct
  misc_feature 1..20: note = Description of Artificial Sequence: Synthetic oligonucleotide
  source 1..20: mol_type = other DNA
cctctcgcagcagcagtcac

SEQ ID NO: 13 - DNA, 20 bp, synthetic construct
  misc_feature 1..20: note = Description of Artificial Sequence: Synthetic oligonucleotide
  source 1..20: mol_type = other DNA
tcctctcgcagcagcagtca

SEQ ID NO: 14 - DNA, 20 bp, synthetic construct
  misc_feature 1..20: note = Description of Artificial Sequence: Synthetic oligonucleotide
  source 1..20: mol_type = other DNA
ctcctctcgcagcagcagtc

SEQ ID NO: 15 - DNA, 20 bp, synthetic construct
  misc_feature 1..20: note = Description of Artificial Sequence: Synthetic oligonucleotide
  source 1..20: mol_type = other DNA
cctcctctcgcagcagcagt

SEQ ID NO: 16 - DNA, 20 bp, synthetic construct
  misc_feature 1..20: note = Description of Artificial Sequence: Synthetic oligonucleotide
  source 1..20: mol_type = other DNA
tcctcctctcgcagcagcag

SEQ ID NO: 17 - DNA, 20 bp, synthetic construct
  misc_feature 1..20: note = Description of Artificial Sequence: Synthetic oligonucleotide
  source 1..20: mol_type = other DNA
ctcctcctctcgcagcagca

SEQ ID NO: 18 - DNA, 20 bp, synthetic construct
  misc_feature 1..20: note = Description of Artificial Sequence: Synthetic oligonucleotide
  source 1..20: mol_type = other DNA
tcctcctcctctcgcagcag

SEQ ID NO: 19 - DNA, 20 bp, synthetic construct
  misc_feature 1..20: note = Description of Artificial Sequence: Synthetic oligonucleotide
  source 1..20: mol_type = other DNA
ctcctcctcctctcgcagca

SEQ ID NO: 20 - DNA, 20 bp, synthetic construct
  misc_feature 1..20: note = Description of Artificial Sequence: Synthetic oligonucleotide
  source 1..20: mol_type = other DNA
tcctcctcctcctctcgcag

SEQ ID NO: 21 - DNA, 20 bp, synthetic construct
  misc_feature 1..20: note = Description of Artificial Sequence: Synthetic oligonucleotide
  source 1..20: mol_type = other DNA
ctcctcctcctcctctcgca

SEQ ID NO: 22 - DNA, 20 bp, synthetic construct
  misc_feature 1..20: note = Description of Artificial Sequence: Synthetic oligonucleotide
  source 1..20: mol_type = other DNA
gctgcttcctcctcctcctc

SEQ ID NO: 23 - DNA, 20 bp, synthetic construct
  misc_feature 1..20: note = Description of Artificial Sequence: Synthetic oligonucleotide
  source 1..20: mol_type = other DNA
cgctgcttcctcctcctcct

SEQ ID NO: 24 - DNA, 20 bp, synthetic construct
  misc_feature 1..20: note = Description of Artificial Sequence: Synthetic oligonucleotide
  source 1..20: mol_type = other DNA
tgtacttcttggtctccccc

SEQ ID NO: 25 - DNA, 20 bp, synthetic construct
  misc_feature 1..20: note = Description of Artificial Sequence: Synthetic oligonucleotide
  source 1..20: mol_type = other DNA
ctgtacttcttggtctcccc

SEQ ID NO: 26 - DNA, 20 bp, synthetic construct
  misc_feature 1..20: note = Description of Artificial Sequence: Synthetic oligonucleotide
  source 1..20: mol_type = other DNA
actgtacttcttggtctccc

SEQ ID NO: 27 - DNA, 20 bp, synthetic construct
  misc_feature 1..20: note = Description of Artificial Sequence: Synthetic oligonucleotide
  source 1..20: mol_type = other DNA
aactgtacttcttggtctcc

SEQ ID NO: 28 - DNA, 20 bp, synthetic construct
  misc_feature 1..20: note = Description of Artificial Sequence: Synthetic oligonucleotide
  source 1..20: mol_type = other DNA
caactgtacttcttggtctc

SEQ ID NO: 29 - DNA, 20 bp, synthetic construct
  misc_feature 1..20: note = Description of Artificial Sequence: Synthetic oligonucleotide
  source 1..20: mol_type = other DNA
ccaactgtacttcttggtct

SEQ ID NO: 30 - DNA, 20 bp, synthetic construct
  misc_feature 1..20: note = Description of Artificial Sequence: Synthetic oligonucleotide
  source 1..20: mol_type = other DNA
cccaactgtacttcttggtc

SEQ ID NO: 31 - DNA, 20 bp, synthetic construct
  misc_feature 1..20: note = Description of Artificial Sequence: Synthetic oligonucleotide
  source 1..20: mol_type = other DNA
tcccaactgtacttcttggt

SEQ ID NO: 32 - DNA, 20 bp, synthetic construct
  misc_feature 1..20: note = Description of Artificial Sequence: Synthetic oligonucleotide
  source 1..20: mol_type = other DNA
ctcccaactgtacttcttgg

SEQ ID NO: 33 - DNA, 20 bp, synthetic construct
  misc_feature 1..20: note = Description of Artificial Sequence: Synthetic oligonucleotide
  source 1..20: mol_type = other DNA
gctcccaactgtacttcttg

SEQ ID NO: 34 - DNA, 20 bp, synthetic construct
  misc_feature 1..20: note = Description of Artificial Sequence: Synthetic oligonucleotide
  source 1..20: mol_type = other DNA
cgctcccaactgtacttctt

SEQ ID NO: 35 - DNA, 20 bp, synthetic construct
  misc_feature 1..20: note = Description of Artificial Sequence: Synthetic oligonucleotide
  source 1..20: mol_type = other DNA
tcgctcccaactgtacttct

SEQ ID NO: 36 - DNA, 20 bp, synthetic construct
  misc_feature 1..20: note = Description of Artificial Sequence: Synthetic oligonucleotide
  source 1..20: mol_type = other DNA
ctcgctcccaactgtacttc

SEQ ID NO: 37 - DNA, 20 bp, synthetic construct
  misc_feature 1..20: note = Description of Artificial Sequence: Synthetic oligonucleotide
  source 1..20: mol_type = other DNA
cctcgctcccaactgtactt

SEQ ID NO: 38 - DNA, 20 bp, synthetic construct
  misc_feature 1..20: note = Description of Artificial Sequence: Synthetic oligonucleotide
  source 1..20: mol_type = other DNA
ccctcgctcccaactgtact

SEQ ID NO: 39 - DNA, 20 bp, synthetic construct
  misc_feature 1..20: note = Description of Artificial Sequence: Synthetic oligonucleotide
  source 1..20: mol_type = other DNA
tccctcgctcccaactgtac

SEQ ID NO: 40 - DNA, 20 bp, synthetic construct
  misc_feature 1..20: note = Description of Artificial Sequence: Synthetic oligonucleotide
  source 1..20: mol_type = other DNA
ctccctcgctcccaactgta

SEQ ID NO: 41 - DNA, 20 bp, synthetic construct
  misc_feature 1..20: note = Description of Artificial Sequence: Synthetic oligonucleotide
  source 1..20: mol_type = other DNA
gctccctcgctcccaactgt

SEQ ID NO: 42 - DNA, 20 bp, synthetic construct
  misc_feature 1..20: note = Description of Artificial Sequence: Synthetic oligonucleotide
  source 1..20: mol_type = other DNA
agctccctcgctcccaactg

SEQ ID NO: 43 - DNA, 20 bp, synthetic construct
  misc_feature 1..20: note = Description of Artificial Sequence: Synthetic oligonucleotide
  source 1..20: mol_type = other DNA
aagctccctcgctcccaact

SEQ ID NO: 44 - DNA, 20 bp, synthetic construct
  misc_feature 1..20: note = Description of Artificial Sequence: Synthetic oligonucleotide
  source 1..20: mol_type = other DNA
gaagctccctcgctcccaac

SEQ ID NO: 45 - DNA, 20 bp, synthetic construct
  misc_feature 1..20: note = Description of Artificial Sequence: Synthetic oligonucleotide
  source 1..20: mol_type = other DNA
tgaagctccctcgctcccaa

SEQ ID NO: 46 - DNA, 20 bp, synthetic construct
  misc_feature 1..20: note = Description of Artificial Sequence: Synthetic oligonucleotide
  source 1..20: mol_type = other DNA
gtgaagctccctcgctccca

SEQ ID NO: 47 - DNA, 20 bp, synthetic construct
  misc_feature 1..20: note = Description of Artificial Sequence: Synthetic oligonucleotide
  source 1..20: mol_type = other DNA
aagaaacaaccaccgccccg

SEQ ID NO: 48 - DNA, 20 bp, synthetic construct
  misc_feature 1..20: note = Description of Artificial Sequence: Synthetic oligonucleotide
  source 1..20: mol_type = other DNA
aaagaaacaaccaccgcccc

SEQ ID NO: 49 - DNA, 20 bp, synthetic construct
  misc_feature 1..20: note = Description of Artificial Sequence: Synthetic oligonucleotide
  source 1..20: mol_type = other DNA
aaaagaaacaaccaccgccc

SEQ ID NO: 50 - DNA, 20 bp, synthetic construct
  misc_feature 1..20: note = Description of Artificial Sequence: Synthetic oligonucleotide
  source 1..20: mol_type = other DNA
aaaaagaaacaaccaccgcc

SEQ ID NO: 51 - DNA, 20 bp, synthetic construct
  misc_feature 1..20: note = Description of Artificial Sequence: Synthetic oligonucleotide
  source 1..20: mol_type = other DNA
cccctcaggaattagaaaaa

SEQ ID NO: 52 - DNA, 20 bp, synthetic construct
  misc_feature 1..20: note = Description of Artificial Sequence: Synthetic oligonucleotide
  source 1..20: mol_type = other DNA
acccctcaggaattagaaaa

SEQ ID NO: 53 - DNA, 20 bp, synthetic construct
  misc_feature 1..20: note = Description of Artificial Sequence: Synthetic oligonucleotide
  source 1..20: mol_type = other DNA
cacccctcaggaattagaaa

SEQ ID NO: 54 - DNA, 20 bp, synthetic construct
  misc_feature 1..20: note = Description of Artificial Sequence: Synthetic oligonucleotide
  source 1..20: mol_type = other DNA
ccacccctcaggaattagaa

SEQ ID NO: 55 - DNA, 20 bp, synthetic construct
  misc_feature 1..20: note = Description of Artificial Sequence: Synthetic oligonucleotide
  source 1..20: mol_type = other DNA
accacccctcaggaattaga

SEQ ID NO: 56 - DNA, 20 bp, synthetic construct
  misc_feature 1..20: note = Description of Artificial Sequence: Synthetic oligonucleotide
  source 1..20: mol_type = other DNA
aaccacccctcaggaattag

SEQ ID NO: 57 - DNA, 20 bp, synthetic construct
  misc_feature 1..20: note = Description of Artificial Sequence: Synthetic oligonucleotide
  source 1..20: mol_type = other DNA
caaccacccctcaggaatta

SEQ ID NO: 58 - DNA, 20 bp, synthetic construct
  misc_feature 1..20: note = Description of Artificial Sequence: Synthetic oligonucleotide
  source 1..20: mol_type = other DNA
gcaaccacccctcaggaatt

SEQ ID NO: 59 - DNA, 20 bp, synthetic construct
  misc_feature 1..20: note = Description of Artificial Sequence: Synthetic oligonucleotide
  source 1..20: mol_type = other DNA
agcaaccacccctcaggaat

SEQ ID NO: 60 - DNA, 20 bp, synthetic construct
  misc_feature 1..20: note = Description of Artificial Sequence: Synthetic oligonucleotide
  source 1..20: mol_type = other DNA
cagcaaccacccctcaggaa

SEQ ID NO: 61 - DNA, 20 bp, synthetic construct
  misc_feature 1..20: note = Description of Artificial Sequence: Synthetic oligonucleotide
  source 1..20: mol_type = other DNA
gcagcaaccacccctcagga

SEQ ID NO: 62 - DNA, 20 bp, synthetic construct
  misc_feature 1..20: note = Description of Artificial Sequence: Synthetic oligonucleotide
  source 1..20: mol_type = other DNA
aagcagcaaccacccctcag

SEQ ID NO: 63 - DNA, 20 bp, synthetic construct
  misc_feature 1..20: note = Description of Artificial Sequence: Synthetic oligonucleotide
  source 1..20: mol_type = other DNA
aaagcagcaaccacccctca

SEQ ID NO: 64 - DNA, 20 bp, synthetic construct
  misc_feature 1..20: note = Description of Artificial Sequence: Synthetic oligonucleotide
  source 1..20: mol_type = other DNA
aaaagcagcaaccacccctc

SEQ ID NO: 65 - DNA, 20 bp, synthetic construct
  misc_feature 1..20: note = Description of Artificial Sequence: Synthetic oligonucleotide
  source 1..20: mol_type = other DNA
caaaagcagcaaccacccct

SEQ ID NO: 66 - DNA, 20 bp, synthetic construct
  misc_feature 1..20: note = Description of Artificial Sequence: Synthetic oligonucleotide
  source 1..20: mol_type = other DNA
gcaaaagcagcaaccacccc

SEQ ID NO: 67 - DNA, 20 bp, synthetic construct
  misc_feature 1..20: note = Description of Artificial Sequence: Synthetic oligonucleotide
  source 1..20: mol_type = other DNA
agcaaaagcagcaaccaccc

SEQ ID NO: 68 - DNA, 20 bp, synthetic construct
  misc_feature 1..20: note = Description of Artificial Sequence: Synthetic oligonucleotide
  source 1..20: mol_type = other DNA
tagcaaaagcagcaaccacc

SEQ ID NO: 69 - DNA, 20 bp, synthetic construct
  misc_feature 1..20: note = Description of Artificial Sequence: Synthetic oligonucleotide
  source 1..20: mol_type = other DNA
gtagcaaaagcagcaaccac

SEQ ID NO: 70 - DNA, 20 bp, synthetic construct
  misc_feature 1..20: note = Description of Artificial Sequence: Synthetic oligonucleotide
  source 1..20: mol_type = other DNA
tgtagcaaaagcagcaacca

SEQ ID NO: 71 - DNA, 20 bp, synthetic construct
  misc_feature 1..20: note = Description of Artificial Sequence: Synthetic oligonucleotide
  source 1..20: mol_type = other DNA
atgtagcaaaagcagcaacc

SEQ ID NO: 72 - DNA, 20 bp, synthetic construct
  misc_feature 1..20: note = Description of Artificial Sequence: Synthetic oligonucleotide
  source 1..20: mol_type = other DNA
catgtagcaaaagcagcaac

SEQ ID NO: 73 - DNA, 20 bp, synthetic construct
  misc_feature 1..20: note = Description of Artificial Sequence: Synthetic oligonucleotide
  source 1..20: mol_type = other DNA
tcatgtagcaaaagcagcaa

SEQ ID NO: 74 - DNA, 20 bp, synthetic construct
  misc_feature 1..20: note = Description of Artificial Sequence: Synthetic oligonucleotide
  source 1..20: mol_type = other DNA
gtcatgtagcaaaagcagca

SEQ ID NO: 75 - DNA, 20 bp, synthetic construct
  misc_feature 1..20: note = Description of Artificial Sequence: Synthetic oligonucleotide
  source 1..20: mol_type = other DNA
agtcatgtagcaaaagcagc

SEQ ID NO: 76 - DNA, 20 bp, synthetic construct
  misc_feature 1..20: note = Description of Artificial Sequence: Synthetic oligonucleotide
  source 1..20: mol_type = other DNA
aagtcatgtagcaaaagcag

SEQ ID NO: 77 - DNA, 20 bp, synthetic construct
  misc_feature 1..20: note = Description of Artificial Sequence: Synthetic oligonucleotide
  source 1..20: mol_type = other DNA
caagtcatgtagcaaaagca

SEQ ID NO: 78 - DNA, 20 bp, synthetic construct
  misc_feature 1..20: note = Description of Artificial Sequence: Synthetic oligonucleotide
  source 1..20: mol_type = other DNA
gcaagtcatgtagcaaaagc

SEQ ID NO: 79 - DNA, 20 bp, synthetic construct
  misc_feature 1..20: note = Description of Artificial Sequence: Synthetic oligonucleotide
  source 1..20: mol_type = other DNA
ggcaagtcatgtagcaaaag

SEQ ID NO: 80 - DNA, 20 bp, synthetic construct
  misc_feature 1..20: note = Description of Artificial Sequence: Synthetic oligonucleotide
  source 1..20: mol_type = other DNA
tggcaagtcatgtagcaaaa

SEQ ID NO: 81 - DNA, 20 bp, synthetic construct
  misc_feature 1..20: note = Description of Artificial Sequence: Synthetic oligonucleotide
  source 1..20: mol_type = other DNA
ctggcaagtcatgtagcaaa

SEQ ID NO: 82 - DNA, 20 bp, synthetic construct
  misc_feature 1..20: note = Description of Artificial Sequence: Synthetic oligonucleotide
  source 1..20: mol_type = other DNA
gctggcaagtcatgtagcaa

SEQ ID NO: 83 - DNA, 20 bp, synthetic construct
  misc_feature 1..20: note = Description of Artificial Sequence: Synthetic oligonucleotide
  source 1..20: mol_type = other DNA
cgctggcaagtcatgtagca

SEQ ID NO: 84 - DNA, 20 bp, synthetic construct
  misc_feature 1..20: note = Description of Artificial Sequence: Synthetic oligonucleotide
  source 1..20: mol_type = other DNA
gcgctggcaagtcatgtagc

SEQ ID NO: 85 - DNA, 20 bp, synthetic construct
  misc_feature 1..20: note = Description of Artificial Sequence: Synthetic oligonucleotide
  source 1..20: mol_type = other DNA
tcacttacagtctggtccca

SEQ ID NO: 86 - DNA, 20 bp, synthetic construct
  misc_feature 1..20: note = Description of Artificial Sequence: Synthetic oligonucleotide
  source 1..20: mol_type = other DNA
ttcacttacagtctggtccc

SEQ ID NO: 87 - DNA, 20 bp, synthetic construct
  misc_feature 1..20: note = Description of Artificial Sequence: Synthetic oligonucleotide
  source 1..20: mol_type = other DNA
acgttcacttacagtctggt

SEQ ID NO: 88 - DNA, 20 bp, synthetic construct
  misc_feature 1..20: note = Description of Artificial Sequence: Synthetic oligonucleotide
  source 1..20: mol_type = other DNA
gtgtaaaacgttcacttaca

SEQ ID NO: 89 - DNA, 20 bp, synthetic construct
  misc_feature 1..20: note = Description of Artificial Sequence: Synthetic oligonucleotide
  source 1..20: mol_type = other DNA
tgtgtaaaacgttcacttac

SEQ ID NO: 90 - DNA, 20 bp, synthetic construct
  misc_feature 1..20: note = Description of Artificial Sequence: Synthetic oligonucleotide
  source 1..20: mol_type = other DNA
gtgtgtaaaacgttcactta

SEQ ID NO: 91 - DNA, 20 bp, synthetic construct
  misc_feature 1..20: note = Description of Artificial Sequence: Synthetic oligonucleotide
  source 1..20: mol_type = other DNA
tgtgtgtaaaacgttcactt

SEQ ID NO: 92 - DNA, 20 bp, synthetic construct
  misc_feature 1..20: note = Description of Artificial Sequence: Synthetic oligonucleotide
  source 1..20: mol_type = other DNA
tgcaaatgtgtgtaaaacgt

SEQ ID NO: 93 - DNA, 20 bp, synthetic construct
  misc_feature 1..20: note = Description of Artificial Sequence: Synthetic oligonucleotide
  source 1..20: mol_type = other DNA
atgcaaatgtgtgtaaaacg

SEQ ID NO: 94 - DNA, 20 bp, synthetic construct
  misc_feature 1..20: note = Description of Artificial Sequence: Synthetic oligonucleotide
  source 1..20: mol_type = other DNA
aatgcaaatgtgtgtaaaac

SEQ ID NO: 95 - DNA, 20 bp, synthetic construct
  misc_feature 1..20: note = Description of Artificial Sequence: Synthetic oligonucleotide
  source 1..20: mol_type = other DNA
caatgcaaatgtgtgtaaaa

SEQ ID NO: 96 - DNA, 20 bp, synthetic construct
  misc_feature 1..20: note = Description of Artificial Sequence: Synthetic oligonucleotide
  source 1..20: mol_type = other DNA
tttacaatgcaaatgtgtgt

SEQ ID NO: 97 - DNA, 20 bp, synthetic construct
  misc_feature 1..20: note = Description of Artificial Sequence: Synthetic oligonucleotide
  source 1..20: mol_type = other DNA
aaatacctggacttattttt

SEQ ID NO: 98 - DNA, 20 bp, synthetic construct
  misc_feature 1..20: note = Description of Artificial Sequence: Synthetic oligonucleotide
  source 1..20: mol_type = other DNA
aaaatacctggacttatttt

SEQ ID NO: 99 - DNA, 20 bp, synthetic construct
  misc_feature 1..20: note = Description of Artificial Sequence: Synthetic oligonucleotide
  source 1..20: mol_type = other DNA
aaaaatacctggacttattt

SEQ ID NO: 100 - DNA, 20 bp, synthetic construct
  misc_feature 1..20: note = Description of Artificial Sequence: Synthetic oligonucleotide
  source 1..20: mol_type = other DNA
aacgtacagaaatgggaggg

SEQ ID NO: 101 - DNA, 20 bp, synthetic construct
  misc_feature 1..20: note = Description of Artificial Sequence: Synthetic oligonucleotide
  source 1..20: mol_type = other DNA
aaacgtacagaaatgggagg

SEQ ID NO: 102 - DNA, 20 bp, synthetic construct
  misc_feature 1..20: note = Description of Artificial Sequence: Synthetic oligonucleotide
  source 1..20: mol_type = other DNA
caaacgtacagaaatgggag

SEQ ID NO: 103 - DNA, 20 bp, synthetic construct
  misc_feature 1..20: note = Description of Artificial Sequence: Synthetic oligonucleotide
  source 1..20: mol_type = other DNA
acaaacgtacagaaatggga

SEQ ID NO: 104 - DNA, 20 bp, synthetic construct
  misc_feature 1..20: note = Description of Artificial Sequence: Synthetic oligonucleotide
  source 1..20: mol_type = other DNA
aacaaacgtacagaaatggg

SEQ ID NO: 105 - DNA, 20 bp, synthetic construct
  misc_feature 1..20: note = Description of Artificial Sequence: Synthetic oligonucleotide
  source 1..20: mol_type = other DNA
gaacaaacgtacagaaatgg

SEQ ID NO: 106 - DNA, 20 bp, synthetic construct
  misc_feature 1..20: note = Description of Artificial Sequence: Synthetic oligonucleotide
  source 1..20: mol_type = other DNA
cactccacaccttgttagaa

SEQ ID NO: 107 - DNA, 20 bp, synthetic construct
  misc_feature 1..20: note = Description of Artificial Sequence: Synthetic oligonucleotide
  source 1..20: mol_type = other DNA
acactccacaccttgttaga

SEQ ID NO: 108 - DNA, 20 bp, synthetic construct
  misc_feature 1..20: note = Description of Artificial Sequence: Synthetic oligonucleotide
  source 1..20: mol_type = other DNA
gacactccacaccttgttag

SEQ ID NO: 109 - DNA, 20 bp, synthetic construct
  misc_feature 1..20: note = Description of Artificial Sequence: Synthetic oligonucleotide
  source 1..20: mol_type = other DNA
tcgctgacactccacacctt

SEQ ID NO: 110 - DNA, 20 bp, synthetic construct
  misc_feature 1..20: note = Description of Artificial Sequence: Synthetic oligonucleotide
  source 1..20: mol_type = other DNA
gtattctccccacattgcac

SEQ ID NO: 111 - DNA, 20 bp, synthetic construct
  misc_feature 1..20: note = Description of Artificial Sequence: Synthetic oligonucleotide
  source 1..20: mol_type = other DNA
tgtattctccccacattgca

SEQ ID NO: 112 - DNA, 20 bp, synthetic construct
  misc_feature 1..20: note = Description of Artificial Sequence: Synthetic oligonucleotide
  source 1..20: mol_type = other DNA
atgtattctccccacattgc

SEQ ID NO: 113 - DNA, 20 bp, synthetic construct
  misc_feature 1..20: note = Description of Artificial Sequence: Synthetic oligonucleotide
  source 1..20: mol_type = other DNA
acaatgtattctccccacat

SEQ ID NO: 114 - DNA, 20 bp, synthetic construct
  misc_feature 1..20: note = Description of Artificial Sequence: Synthetic oligonucleotide
  source 1..20: mol_type = other DNA
ttgacttccaaaccttatat

SEQ ID NO: 115 - DNA, 20 bp, synthetic construct
  misc_feature 1..20: note = Description of Artificial Sequence: Synthetic oligonucleotide
  source 1..20: mol_type = other DNA
tttgacttccaaaccttata

SEQ ID NO: 116 - DNA, 20 bp, synthetic construct
  misc_feature 1..20: note = Description of Artificial Sequence: Synthetic oligonucleotide
  source 1..20: mol_type = other DNA
ctactataatttgacttcca

SEQ ID NO: 117 - DNA, 20 bp, synthetic construct
  misc_feature 1..20: note = Description of Artificial Sequence: Synthetic oligonucleotide
  source 1..20: mol_type = other DNA
tctactataatttgacttcc

SEQ ID NO: 118 - DNA, 20 bp, synthetic construct
  misc_feature 1..20: note = Description of Artificial Sequence: Synthetic oligonucleotide
  source 1..20: mol_type = other DNA
ttctactataatttgacttc

SEQ ID NO: 119 - DNA, 20 bp, synthetic construct
  misc_feature 1..20: note = Description of Artificial Sequence: Synthetic oligonucleotide
  source 1..20: mol_type = other DNA
cattctactataatttgact

SEQ ID NO: 120 - DNA, 20 bp, synthetic construct
  misc_feature 1..20: note = Description of Artificial Sequence: Synthetic oligonucleotide
  source 1..20: mol_type = other DNA
acattctactataatttgac

SEQ ID NO: 121 - DNA, 20 bp, synthetic construct
  misc_feature 1..20: note = Description of Artificial Sequence: Synthetic oligonucleotide
  source 1..20: mol_type = other DNA
gatacacattctactataat

SEQ ID NO: 122 - DNA, 20 bp, synthetic construct
  misc_feature 1..20: note = Description of Artificial Sequence: Synthetic oligonucleotide
  source 1..20: mol_type = other DNA
agatacacattctactataa

SEQ ID NO: 123 - DNA, 20 bp, synthetic construct
  misc_feature 1..20: note = Description of Artificial Sequence: Synthetic oligonucleotide
  source 1..20: mol_type = other DNA
tagatacacattctactata

SEQ ID NO: 124 - DNA, 20 bp, synthetic construct
  misc_feature 1..20: note = Description of Artificial Sequence: Synthetic oligonucleotide
  source 1..20: mol_type = other DNA
ttagatacacattctactat

SEQ ID NO: 125 - DNA, 20 bp, synthetic construct
  misc_feature 1..20: note = Description of Artificial Sequence: Synthetic oligonucleotide
  source 1..20: mol_type = other DNA
tttagatacacattctacta

SEQ ID NO: 126 - DNA, 20 bp, synthetic construct
  misc_feature 1..20: note = Description of Artificial Sequence: Synthetic oligonucleotide
  source 1..20: mol_type = other DNA
atttagatacacattctact

SEQ ID NO: 127 - DNA, 20 bp, synthetic construct
  misc_feature 1..20: note = Description of Artificial Sequence: Synthetic oligonucleotide
  source 1..20: mol_type = other DNA
tatttagatacacattctac

SEQ ID NO: 128 - DNA, 20 bp, synthetic construct
  misc_feature 1..20: note = Description of Artificial Sequence: Synthetic oligonucleotide
  source 1..20: mol_type = other DNA
ctatttagatacacattcta

SEQ ID NO: 129 - DNA, 20 bp, synthetic construct
  misc_feature 1..20: note = Description of Artificial Sequence: Synthetic oligonucleotide
  source 1..20: mol_type = other DNA
cactatttagatacacattc

SEQ ID NO: 130 - DNA, 20 bp, synthetic construct
  misc_feature 1..20: note = Description of Artificial Sequence: Synthetic oligonucleotide
  source 1..20: mol_type = other DNA
gtcactatttagatacacat

SEQ ID NO: 131 - DNA, 20 bp, synthetic construct
  misc_feature 1..20: note = Description of Artificial Sequence: Synthetic oligonucleotide
  source 1..20: mol_type = other DNA
agtcactatttagatacaca

SEQ ID NO: 132 - DNA, 20 bp, synthetic construct
  misc_feature 1..20: note = Description of Artificial Sequence: Synthetic oligonucleotide
  source 1..20: mol_type = other DNA
cagtcactatttagatacac

SEQ ID NO: 133 - DNA, 20 bp, synthetic construct
  misc_feature 1..20: note = Description of Artificial Sequence: Synthetic oligonucleotide
  source 1..20: mol_type = other DNA
agcagtcactatttagatac

SEQ ID NO: 134 - DNA, 20 bp, synthetic construct
  misc_feature 1..20: note = Description of Artificial Sequence: Synthetic oligonucleotide
  source 1..20: mol_type = other DNA
aagcagtcactatttagata

SEQ ID NO: 135 - DNA, 20 bp, synthetic construct
  misc_feature 1..20: note = Description of Artificial Sequence: Synthetic oligonucleotide
  source 1..20: mol_type = other DNA
aaagcagtcactatttagat

SEQ ID NO: 136 - DNA, 20 bp, synthetic construct
  misc_feature 1..20: note = Description of Artificial Sequence: Synthetic oligonucleotide
  source 1..20: mol_type = other DNA
caaagcagtcactatttaga

SEQ ID NO: 137 - DNA, 20 bp, synthetic construct
  misc_feature 1..20: note = Description of Artificial Sequence: Synthetic oligonucleotide
  source 1..20: mol_type = other DNA
gcaaagcagtcactatttag

SEQ ID NO: 138 - DNA, 20 bp, synthetic construct
  misc_feature 1..20: note = Description of Artificial Sequence: Synthetic oligonucleotide
  source 1..20: mol_type = other DNA
ggcaaagcagtcactattta

SEQ ID NO: 139 - DNA, 20 bp, synthetic construct
  misc_feature 1..20: note = Description of Artificial Sequence: Synthetic oligonucleotide
  source 1..20: mol_type = other DNA
tggcaaagcagtcactattt

SEQ ID NO: 140 - DNA, 20 bp, synthetic construct
  misc_feature 1..20: note = Description of Artificial Sequence: Synthetic oligonucleotide
  source 1..20: mol_type = other DNA
aatggcaaagcagtcactat

SEQ ID NO: 141 - DNA, 20 bp, synthetic construct
  misc_feature 1..20: note = Description of Artificial Sequence: Synthetic oligonucleotide
  source 1..20: mol_type = other DNA
aaatggcaaagcagtcacta

SEQ ID NO: 142 - DNA, 20 bp, synthetic construct
  misc_feature 1..20: note = Description of Artificial Sequence: Synthetic oligonucleotide
  source 1..20: mol_type = other DNA
gaaatggcaaagcagtcact

SEQ ID NO: 143 - DNA, 20 bp, synthetic construct
  misc_feature 1..20: note = Description of Artificial Sequence: Synthetic oligonucleotide
  source 1..20: mol_type = other DNA
aatgaaatggcaaagcagtc

SEQ ID NO: 144 - DNA, 20 bp, synthetic construct
  misc_feature 1..20: note = Description of Artificial Sequence: Synthetic oligonucleotide
  source 1..20: mol_type = other DNA
aggtttgaatgaaatggcaa

SEQ ID NO: 145 - DNA, 20 bp, synthetic construct
  misc_feature 1..20: note = Description of Artificial Sequence: Synthetic oligonucleotide
  source 1..20: mol_type = other DNA
caggtttgaatgaaatggca

SEQ ID NO: 146 - DNA, 20 bp, synthetic construct
  misc_feature 1..20: note = Description of Artificial Sequence: Synthetic oligonucleotide
  source 1..20: mol_type = other DNA
tcaggtttgaatgaaatggc

SEQ ID NO: 147 - DNA, 20 bp, synthetic construct
  misc_feature 1..20: note = Description of Artificial Sequence: Synthetic oligonucleotide
  source 1..20: mol_type = other DNA
gtcaggtttgaatgaaatgg

SEQ ID NO: 148 - DNA, 20 bp, synthetic construct
  misc_feature 1..20: note = Description of Artificial Sequence: Synthetic oligonucleotide
  source 1..20: mol_type = other DNA
cttgtcaggtttgaatgaaa

SEQ ID NO: 149 - DNA, 20 bp, synthetic construct
  misc_feature 1..20: note = Description of Artificial Sequence: Synthetic oligonucleotide
  source 1..20: mol_type = other DNA
cttagagatagacttgtcag

SEQ ID NO: 150 - DNA, 20 bp, synthetic construct
  misc_feature 1..20: note = Description of Artificial Sequence: Synthetic oligonucleotide
  source 1..20: mol_type = other DNA
tcttagagatagacttgtca

SEQ ID NO: 151 - DNA, 20 bp, synthetic construct
  misc_feature 1..20: note = Description of Artificial Sequence: Synthetic oligonucleotide
  source 1..20: mol_type = other DNA
ctcttagagatagacttgtc

SEQ ID NO: 152 - DNA, 20 bp, synthetic construct
  misc_feature 1..20: note = Description of Artificial Sequence: Synthetic oligonucleotide
  source 1..20: mol_type = other DNA
gctcttagagatagacttgt

SEQ ID NO: 153 - DNA, 20 bp, synthetic construct
  misc_feature 1..20: note = Description of Artificial Sequence: Synthetic oligonucleotide
  source 1..20: mol_type = other DNA
ggctcttagagatagacttg

SEQ ID NO: 154 - DNA, 20 bp, synthetic construct
  misc_feature 1..20: note = Description of Artificial Sequence: Synthetic oligonucleotide
  source 1..20: mol_type = other DNA
cggctcttagagatagactt

SEQ ID NO: 155 - DNA, 20 bp, synthetic construct
  misc_feature 1..20: note = Description of Artificial Sequence: Synthetic oligonucleotide
  source 1..20: mol_type = other DNA
gcggctcttagagatagact

SEQ ID NO: 156 - DNA, 20 bp, synthetic construct
  misc_feature 1..20: note = Description of Artificial Sequence: Synthetic oligonucleotide
  source 1..20: mol_type = other DNA
tggcggctcttagagataga

SEQ ID NO: 157 - DNA, 20 bp, synthetic construct
  misc_feature 1..20: note = Description of Artificial Sequence: Synthetic oligonucleotide
  source 1..20: mol_type = other DNA
tctggcggctcttagagata

SEQ ID NO: 158 - DNA, 20 bp, synthetic construct
  misc_feature 1..20: note = Description of Artificial Sequence: Synthetic oligonucleotide
  source 1..20: mol_type = other DNA
atctggcggctcttagagat

SEQ ID NO: 159 - DNA, 20 bp, synthetic construct
  misc_feature 1..20: note = Description of Artificial Sequence: Synthetic oligonucleotide
  source 1..20: mol_type = other DNA
aatctggcggctcttagaga

SEQ ID NO: 160 - DNA, 20 bp, synthetic construct
  misc_feature 1..20: note = Description of Artificial Sequence: Synthetic oligonucleotide
  source 1..20: mol_type = other DNA
tactgcacacatggaaatct

SEQ ID NO: 161 - DNA, 20 bp, synthetic construct
  misc_feature 1..20: note = Description of Artificial Sequence: Synthetic oligonucleotide
  source 1..20: mol_type = other DNA
atactgcacacatggaaatc

SEQ ID NO: 162 - DNA, 20 bp, synthetic construct
  misc_feature 1..20: note = Description of Artificial Sequence: Synthetic oligonucleotide
  source 1..20: mol_type = other DNA
aatactgcacacatggaaat

SEQ ID NO: 163 - DNA, 20 bp, synthetic construct
  misc_feature 1..20: note = Description of Artificial Sequence: Synthetic oligonucleotide
  source 1..20: mol_type = other DNA
ataatactgcacacatggaa

SEQ ID NO: 164 - DNA, 20 bp, synthetic construct
  misc_feature 1..20: note = Description of Artificial Sequence: Synthetic oligonucleotide
  source 1..20: mol_type = other DNA
cttataatactgcacacatg

SEQ ID NO: 165 - DNA, 20 bp, synthetic construct
  misc_feature 1..20: note = Description of Artificial Sequence: Synthetic oligonucleotide
  source 1..20: mol_type = other DNA
aacttataatactgcacaca

SEQ ID NO: 166 - DNA, 20 bp, synthetic construct
  misc_feature 1..20: note = Description of Artificial Sequence: Synthetic oligonucleotide
  source 1..20: mol_type = other DNA
taacttataatactgcacac

SEQ ID NO: 167 - DNA, 20 bp, synthetic construct
  misc_feature 1..20: note = Description of Artificial Sequence: Synthetic oligonucleotide
  source 1..20: mol_type = other DNA
ataacttataatactgcaca

SEQ ID NO: 168 - DNA, 20 bp, synthetic construct
  misc_feature 1..20: note = Description of Artificial Sequence: Synthetic oligonucleotide
  source 1..20: mol_type = other DNA
gataacttataatactgcac

SEQ ID NO: 169 - DNA, 20 bp, synthetic construct
  misc_feature 1..20: note = Description of Artificial Sequence: Synthetic oligonucleotide
  source 1..20: mol_type = other DNA
tgataacttataatactgca

SEQ ID NO: 170 - DNA, 20 bp, synthetic construct
  misc_feature 1..20: note = Description of Artificial Sequence: Synthetic oligonucleotide
  source 1..20: mol_type = other DNA
atgataacttataatactgc

SEQ ID NO: 171 - DNA, 20 bp, synthetic construct
  misc_feature 1..20: note = Description of Artificial Sequence: Synthetic oligonucleotide
  source 1..20: mol_type = other DNA
gttccatgataacttataat

SEQ ID NO: 172 - DNA, 20 bp, synthetic construct
  misc_feature 1..20: note = Description of Artificial Sequence: Synthetic oligonucleotide
  source 1..20: mol_type = other DNA
agttccatgataacttataa

SEQ ID NO: 173 - DNA, 20 bp, synthetic construct
  misc_feature 1..20: note = Description of Artificial Sequence: Synthetic oligonucleotide
  source 1..20: mol_type = other DNA
tagttccatgataacttata

SEQ ID NO: 174 - DNA, 20 bp, synthetic construct
  misc_feature 1..20: note = Description of Artificial Sequence: Synthetic oligonucleotide
  source 1..20: mol_type = other DNA
atagttccatgataacttat

SEQ ID NO: 175 - DNA, 20 bp, synthetic construct
  misc_feature 1..20: note = Description of Artificial Sequence: Synthetic oligonucleotide
  source 1..20: mol_type = other DNA
tatagttccatgataactta

SEQ ID NO: 176 - DNA, 20 bp, synthetic construct
  misc_feature 1..20: note = Description of Artificial Sequence: Synthetic oligonucleotide
  source 1..20: mol_type = other DNA
tctgcgtccaccatatagtt

SEQ ID NO: 177 - DNA, 20 bp, synthetic construct
  misc_feature 1..20: note = Description of Artificial Sequence: Synthetic oligonucleotide
  source 1..20: mol_type = other DNA
gtctgcgtccaccatatagt

SEQ ID NO: 178 - DNA, 20 bp, synthetic construct
  misc_feature 1..20: note = Description of Artificial Sequence: Synthetic oligonucleotide
  source 1..20: mol_type = other DNA
ggtctgcgtccaccatatag

SEQ ID NO: 179 - DNA, 20 bp, synthetic construct
  misc_feature 1..20: note = Description of Artificial Sequence: Synthetic oligonucleotide
  source 1..20: mol_type = other DNA
aggtctgcgtccaccatata

SEQ ID NO: 180 - DNA, 20 bp, synthetic construct
  misc_feature 1..20: note = Description of Artificial Sequence: Synthetic oligonucleotide
  source 1..20: mol_type = other DNA
aaggtctgcgtccaccatat

SEQ ID NO: 181 - DNA, 20 bp, synthetic construct
  misc_feature 1..20: note = Description of Artificial Sequence: Synthetic oligonucleotide
  source 1..20: mol_type = other DNA
ttctcaaggtctgcgtccac

SEQ ID NO: 182 - DNA, 20 bp, synthetic construct
  misc_feature 1..20: note = Description of Artificial Sequence: Synthetic oligonucleotide
  source 1..20: mol_type = other DNA
gttctcaaggtctgcgtcca

SEQ ID NO: 183 - DNA, 20 bp, synthetic construct
  misc_feature 1..20: note = Description of Artificial Sequence: Synthetic oligonucleotide
  source 1..20: mol_type = other DNA
tgttctcaaggtctgcgtcc

SEQ ID NO: 184 - DNA, 20 bp, synthetic construct
  misc_feature 1..20: note = Description of Artificial Sequence: Synthetic oligonucleotide
  source 1..20: mol_type = other DNA
ttgttctcaaggtctgcgtc

SEQ ID NO: 185 - DNA, 20 bp, synthetic construct
  misc_feature 1..20: note = Description of Artificial Sequence: Synthetic oligonucleotide
  source 1..20: mol_type = other DNA
gttgttctcaaggtctgcgt

SEQ ID NO: 186 - DNA, 20 bp, synthetic construct
  misc_feature 1..20: note = Description of Artificial Sequence: Synthetic oligonucleotide
  source 1..20: mol_type = other DNA
ggttgttctcaaggtctgcg

SEQ ID NO: 187 - DNA, 20 bp, synthetic construct
  misc_feature 1..20: note = Description of Artificial Sequence: Synthetic oligonucleotide
  source 1..20: mol_type = other DNA
aggttgttctcaaggtctgc

SEQ ID NO: 188 - DNA, 20 bp, synthetic construct
  misc_feature 1..20: note = Description of Artificial Sequence: Synthetic oligonucleotide
  source 1..20: mol_type = other DNA
taggttgttctcaaggtctg

SEQ ID NO: 189 - DNA, 20 bp, synthetic construct
  misc_feature 1..20: note = Description of Artificial Sequence: Synthetic oligonucleotide
  source 1..20: mol_type = other DNA
ttaggttgttctcaaggtct

SEQ ID NO: 190 - DNA, 20 bp, synthetic construct
  misc_feature 1..20: note = Description of Artificial Sequence: Synthetic oligonucleotide
  source 1..20: mol_type = other DNA
tttaggttgttctcaaggtc

SEQ ID NO: 191 - DNA, 20 bp, synthetic construct
  misc_feature 1..20: note = Description of Artificial Sequence: Synthetic oligonucleotide
  source 1..20: mol_type = other DNA
aatttaggttgttctcaagg

SEQ ID NO: 192 - DNA, 20 bp, synthetic construct
  misc_feature 1..20: note = Description of Artificial Sequence: Synthetic oligonucleotide
  source 1..20: mol_type = other DNA
cccataatttaggttgttct

SEQ ID NO: 193 - DNA, 20 bp, synthetic construct
  misc_feature 1..20: note = Description of Artificial Sequence: Synthetic oligonucleotide
  source 1..20: mol_type = other DNA
ccccataatttaggttgttc

SEQ ID NO: 194 - DNA, 20 bp, synthetic construct
  misc_feature 1..20: note = Description of Artificial Sequence: Synthetic oligonucleotide
  source 1..20: mol_type = other DNA
tccccataatttaggttgtt

SEQ ID NO: 195 - DNA, 20 bp, synthetic construct
  misc_feature 1..20: note = Description of Artificial Sequence: Synthetic oligonucleotide
  source 1..20: mol_type = other DNA
ctccccataatttaggttgt

SEQ ID NO: 196 - DNA, 20 bp, synthetic construct
  misc_feature 1..20: note = Description of Artificial Sequence: Synthetic oligonucleotide
  source 1..20: mol_type = other DNA
tctccccataatttaggttg

SEQ ID NO: 197 - DNA, 20 bp, synthetic construct
  misc_feature 1..20: note = Description of Artificial Sequence: Synthetic oligonucleotide
  source 1..20: mol_type = other DNA
aaattctccccataatttag

SEQ ID NO: 198 - DNA, 20 bp, synthetic construct
  misc_feature 1..20: note = Description of Artificial Sequence: Synthetic oligonucleotide
  source 1..20: mol_type = other DNA
caataaatggccaaaataat

SEQ ID NO: 199 - DNA, 20 bp, synthetic construct
  misc_feature 1..20: note = Description of Artificial Sequence: Synthetic oligonucleotide
  source 1..20: mol_type = other DNA
tctttggtctaaaagtaaac

SEQ ID NO: 200 - DNA, 20 bp, synthetic construct
  misc_feature 1..20: note = Description of Artificial Sequence: Synthetic oligonucleotide
  source 1..20: mol_type = other DNA
atctttggtctaaaagtaaa

SEQ ID NO: 201 - DNA, 20 bp, synthetic construct
  misc_feature 1..20: note = Description of Artificial Sequence: Synthetic oligonucleotide
  source 1..20: mol_type = other DNA
aatctttggtctaaaagtaa

SEQ ID NO: 202 - DNA, 20 bp, synthetic construct
  misc_feature 1..20: note = Description of Artificial Sequence: Synthetic oligonucleotide
  source 1..20: mol_type = other DNA
caatctttggtctaaaagta

SEQ ID NO: 203 - DNA, 20 bp, synthetic construct
  misc_feature 1..20: note = Description of Artificial Sequence: Synthetic oligonucleotide
  source 1..20: mol_type = other DNA
tttctagaacccaatctttg

SEQ ID NO: 204 - DNA, 20 bp, synthetic construct
  misc_feature 1..20: note = Description of Artificial Sequence: Synthetic oligonucleotide
  source 1..20: mol_type = other DNA
cattttctagaacccaatct

SEQ ID NO: 205 - DNA, 20 bp, synthetic construct
  misc_feature 1..20: note = Description of Artificial Sequence: Synthetic oligonucleotide
  source 1..20: mol_type = other DNA
gcattttctagaacccaatc

SEQ ID NO: 206 - DNA, 20 bp, synthetic construct
  misc_feature 1..20: note = Description of Artificial Sequence: Synthetic oligonucleotide
  source 1..20: mol_type = other DNA
tgcattttctagaacccaat

SEQ ID NO: 207 - DNA, 20 bp, synthetic construct
  misc_feature 1..20: note = Description of Artificial Sequence: Synthetic oligonucleotide
  source 1..20: mol_type = other DNA
gtgcattttctagaacccaa

SEQ ID NO: 208 - DNA, 20 bp, synthetic construct
  misc_feature 1..20: note = Description of Artificial Sequence: Synthetic oligonucleotide
  source 1..20: mol_type = other DNA
agtgcattttctagaaccca

SEQ ID NO: 209 - DNA, 20 bp, synthetic construct
  misc_feature 1..20: note = Description of Artificial Sequence: Synthetic oligonucleotide
  source 1..20: mol_type = other DNA
caagtgcattttctagaacc

SEQ ID NO: 210 - DNA, 20 bp, synthetic construct
  misc_feature 1..20: note = Description of Artificial Sequence: Synthetic oligonucleotide
  source 1..20: mol_type = other DNA
ccaagtgcattttctagaac

SEQ ID NO: 211 - DNA, 20 bp, synthetic construct
  misc_feature 1..20: note = Description of Artificial Sequence: Synthetic oligonucleotide
  source 1..20: mol_type = other DNA
accaagtgcattttctagaa

SEQ ID NO: 212 - DNA, 20 bp, synthetic construct
  misc_feature 1..20: note = Description of Artificial Sequence: Synthetic oligonucleotide
  source 1..20: mol_type = other DNA
taccaagtgcattttctaga

SEQ ID NO: 213 - DNA, 20 bp, synthetic construct
  misc_feature 1..20: note = Description of Artificial Sequence: Synthetic oligonucleotide
  source 1..20: mol_type = other DNA
ataccaagtgcattttctag

SEQ ID NO: 214 - DNA, 20 bp, synthetic construct
  misc_feature 1..20: note = Description of Artificial Sequence: Synthetic oligonucleotide
  source 1..20: mol_type = other DNA
tataccaagtgcattttcta

SEQ ID NO: 215 - DNA, 20 bp, synthetic construct
  misc_feature 1..20: note = Description of Artificial Sequence: Synthetic oligonucleotide
  source 1..20: mol_type = other DNA
gtataccaagtgcattttct

SEQ ID NO: 216 - DNA, 20 bp, synthetic construct
  misc_feature 1..20: note = Description of Artificial Sequence: Synthetic oligonucleotide
  source 1..20: mol_type = other DNA
agtataccaagtgcattttc

SEQ ID NO: 217 - DNA, 20 bp, synthetic construct
  misc_feature 1..20: note = Description of Artificial Sequence: Synthetic oligonucleotide
  source 1..20: mol_type = other DNA
tagtataccaagtgcatttt

SEQ ID NO: 218 - DNA, 20 bp, synthetic construct
  misc_feature 1..20: note = Description of Artificial Sequence: Synthetic oligonucleotide
  source 1..20: mol_type = other DNA
ttagtataccaagtgcattt

SEQ ID NO: 219 - DNA, 20 bp, synthetic construct
  misc_feature 1..20: note = Description of Artificial Sequence: Synthetic oligonucleotide
  source 1..20: mol_type = other DNA
acttagtataccaagtgcat

SEQ ID NO: 220 - DNA, 20 bp, synthetic construct
  misc_feature 1..20: note = Description of Artificial Sequence: Synthetic oligonucleotide
  source 1..20: mol_type = other DNA
tacttagtataccaagtgca

SEQ ID NO: 221 - DNA, 20 bp, synthetic construct
  misc_feature 1..20: note = Description of Artificial Sequence: Synthetic oligonucleotide
  source 1..20: mol_type = other DNA
atacttagtataccaagtgc

SEQ ID NO: 222 - DNA, 20 bp, synthetic construct
  misc_feature 1..20: note = Description of Artificial Sequence: Synthetic oligonucleotide
  source 1..20: mol_type = other DNA
aatacttagtataccaagtg

SEQ ID NO: 223 - DNA, 20 bp, synthetic construct
  misc_feature 1..20: note = Description of Artificial Sequence: Synthetic oligonucleotide
  source 1..20: mol_type = other DNA
gttttaatacttagtatacc

SEQ ID NO: 224 - DNA, 20 bp, synthetic construct
  misc_feature 1..20: note = Description of Artificial Sequence: Synthetic oligonucleotide
  source 1..20: mol_type = other DNA
agtgttgccaactgaaacaa

SEQ ID NO: 225 - DNA, 20 bp, synthetic construct
  misc_feature 1..20: note = Description of Artificial Sequence: Synthetic oligonucleotide
  source 1..20: mol_type = other DNA
caattgaatgggcagtgttg

SEQ ID NO: 226 - DNA, 20 bp, synthetic construct
  misc_feature 1..20: note = Description of Artificial Sequence: Synthetic oligonucleotide
  source 1..20: mol_type = other DNA
tcaattgaatgggcagtgtt

SEQ ID NO: 227 - DNA, 20 bp, synthetic construct
  misc_feature 1..20: note = Description of Artificial Sequence: Synthetic oligonucleotide
  source 1..20: mol_type = other DNA
ttcaattgaatgggcagtgt

SEQ ID NO: 228 - DNA, 20 bp, synthetic construct
  misc_feature 1..20: note = Description of Artificial Sequence: Synthetic oligonucleotide
  source 1..20: mol_type = other DNA
tgaaggcaatcgttaatttt

SEQ ID NO: 229 - DNA, 20 bp, synthetic construct
  misc_feature 1..20: note = Description of Artificial Sequence: Synthetic oligonucleotide
  source 1..20: mol_type = other DNA
ctgaaggcaatcgttaattt

SEQ ID NO: 230 - DNA, 20 bp, synthetic construct
  misc_feature 1..20: note = Description of Artificial Sequence: Synthetic oligonucleotide
  source 1..20: mol_type = other DNA
actgaaggcaatcgttaatt

SEQ ID NO: 231 - DNA, 20 bp, synthetic construct
  misc_feature 1..20: note = Description of Artificial Sequence: Synthetic oligonucleotide
  source 1..20: mol_type = other DNA
aactgaaggcaatcgttaat

SEQ ID NO: 232 - DNA, 20 bp, synthetic construct
  misc_feature 1..20: note = Description of Artificial Sequence: Synthetic oligonucleotide
  source 1..20: mol_type = other DNA
aaactgaaggcaatcgttaa

SEQ ID NO: 233 - DNA, 20 bp, synthetic construct
  misc_feature 1..20: note = Description of Artificial Sequence: Synthetic oligonucleotide
  source 1..20: mol_type = other DNA
caaactgaaggcaatcgtta

SEQ ID NO: 234 - DNA, 20 bp, synthetic construct
  misc_feature 1..20: note = Description of Artificial Sequence: Synthetic oligonucleotide
  source 1..20: mol_type = other DNA
acaaactgaaggcaatcgtt

SEQ ID NO: 235 - DNA, 20 bp, synthetic construct
  misc_feature 1..20: note = Description of Artificial Sequence: Synthetic oligonucleotide
  source 1..20: mol_type = other DNA
acacaaactgaaggcaatcg

SEQ ID NO: 236 - DNA, 20 bp, synthetic construct
  misc_feature 1..20: note = Description of Artificial Sequence: Synthetic oligonucleotide
  source 1..20: mol_type = other DNA
gtgaccacatacatcaaaat

SEQ ID NO: 237 - DNA, 20 bp, synthetic construct
  misc_feature 1..20: note = Description of Artificial Sequence: Synthetic oligonucleotide
  source 1..20: mol_type = other DNA
ttagtgaccacatacatcaa

SEQ ID NO: 238 - DNA, 20 bp, synthetic construct
  misc_feature 1..20: note = Description of Artificial Sequence: Synthetic oligonucleotide
  source 1..20: mol_type = other DNA
tttacctataagtacaatag

SEQ ID NO: 239 - DNA, 20 bp, synthetic construct
  misc_feature 1..20: note = Description of Artificial Sequence: Synthetic oligonucleotide
  source 1..20: mol_type = other DNA
gtttacctataagtacaata

SEQ ID NO: 240 - DNA, 20 bp, synthetic construct
  misc_feature 1..20: note = Description of Artificial Sequence: Synthetic oligonucleotide
  source 1..20: mol_type = other DNA
ggtttacctataagtacaat

SEQ ID NO: 241 - DNA, 20 bp, synthetic construct
  misc_feature 1..20: note = Description of Artificial Sequence: Synthetic oligonucleotide
  source 1..20: mol_type = other DNA
acatatttgcaaggtttacc

SEQ ID NO: 242 - DNA, 20 bp, synthetic construct
  misc_feature 1..20: note = Description of Artificial Sequence: Synthetic oligonucleotide
  source 1..20: mol_type = other DNA
tacatatttgcaaggtttac

SEQ ID NO: 243 - DNA, 20 bp, synthetic construct
  misc_feature 1..20: note = Description of Artificial Sequence: Synthetic oligonucleotide
  source 1..20: mol_type = other DNA
ttacatatttgcaaggttta

SEQ ID NO: 244 - DNA, 20 bp, synthetic construct
  misc_feature 1..20: note = Description of Artificial Sequence: Synthetic oligonucleotide
  source 1..20: mol_type = other DNA
gttacatatttgcaaggttt

SEQ ID NO: 245 - DNA, 20 bp, synthetic construct
  misc_feature 1..20: note = Description of Artificial Sequence: Synthetic oligonucleotide
  source 1..20: mol_type = other DNA
ggttacatatttgcaaggtt

SEQ ID NO: 246 - DNA, 20 bp, synthetic construct
  misc_feature 1..20: note = Description of Artificial Sequence: Synthetic oligonucleotide
  source 1..20: mol_type = other DNA
aggttacatatttgcaaggt

SEQ ID NO: 247 - DNA, 20 bp, synthetic construct
  misc_feature 1..20: note = Description of Artificial Sequence: Synthetic oligonucleotide
  source 1..20: mol_type = other DNA
caggttacatatttgcaagg

SEQ ID NO: 248 - DNA, 20 bp, synthetic construct
  misc_feature 1..20: note = Description of Artificial Sequence: Synthetic oligonucleotide
  source 1..20: mol_type = other DNA
acaggttacatatttgcaag

SEQ ID NO: 249 - DNA, 20 bp, synthetic construct
  misc_feature 1..20: note = Description of Artificial Sequence: Synthetic oligonucleotide
  source 1..20: mol_type = other DNA
acacaggttacatatttgca

SEQ ID NO: 250 - DNA, 20 bp, synthetic construct
  misc_feature 1..20: note = Description of Artificial Sequence: Synthetic oligonucleotide
  source 1..20: mol_type = other DNA
aacacaggttacatatttgc

SEQ ID NO: 251 - DNA, 20 bp, synthetic construct
  misc_feature 1..20: note = Description of Artificial Sequence: Synthetic oligonucleotide
  source 1..20: mol_type = other DNA
gcaacacaggttacatattt

SEQ ID NO: 252 - DNA, 20 bp, synthetic construct
  misc_feature 1..20: note = Description of Artificial Sequence: Synthetic oligonucleotide
  source 1..20: mol_type = other DNA
gcgcaacacaggttacatat

SEQ ID NO: 253 - DNA, 20 bp, synthetic construct
  misc_feature 1..20: note = Description of Artificial Sequence: Synthetic oligonucleotide
  source 1..20: mol_type = other DNA
tgcgcaacacaggttacata

SEQ ID NO: 254 - DNA, 20 bp, synthetic construct
  misc_feature 1..20: note = Description of Artificial Sequence: Synthetic oligonucleotide
  source 1..20: mol_type = other DNA
ttgcgcaacacaggttacat

SEQ ID NO: 255 - DNA, 20 bp, synthetic construct
  misc_feature 1..20: note = Description of Artificial Sequence: Synthetic oligonucleotide
  source 1..20: mol_type = other DNA
tttgcgcaacacaggttaca

SEQ ID NO: 256 - DNA, 20 bp, synthetic construct
  misc_feature 1..20: note = Description of Artificial Sequence: Synthetic oligonucleotide
  source 1..20: mol_type = other DNA
catttgcgcaacacaggtta

SEQ ID NO: 257 - DNA, 20 bp, synthetic construct
  misc_feature 1..20: note = Description of Artificial Sequence: Synthetic oligonucleotide
  source 1..20: mol_type = other DNA
actcaaatttatgcggcatt

SEQ ID NO: 258 - DNA, 20 bp, synthetic construct
  misc_feature 1..20: note = Description of Artificial Sequence: Synthetic oligonucleotide
  source 1..20: mol_type = other DNA
atcactcaaatttatgcggc

SEQ ID NO: 259 - DNA, 20 bp, synthetic construct
  misc_feature 1..20: note = Description of Artificial Sequence: Synthetic oligonucleotide
  source 1..20: mol_type = other DNA
acattaacaatcactcaaat

SEQ ID NO: 260 - DNA, 20 bp, synthetic construct
  misc_feature 1..20: note = Description of Artificial Sequence: Synthetic oligonucleotide
  source 1..20: mol_type = other DNA
caacattaacaatcactcaa

SEQ ID NO: 261 - DNA, 20 bp, synthetic construct
  misc_feature 1..20: note = Description of Artificial Sequence: Synthetic oligonucleotide
  source 1..20: mol_type = other DNA
acaacattaacaatcactca

SEQ ID NO: 262 - DNA, 20 bp, synthetic construct
  misc_feature 1..20: note = Description of Artificial Sequence: Synthetic oligonucleotide
  source 1..20: mol_type = other DNA
gacaacattaacaatcactc

SEQ ID NO: 263 - DNA, 20 bp, synthetic construct
  misc_feature 1..20: note = Description of Artificial Sequence: Synthetic oligonucleotide
  source 1..20: mol_type = other DNA
agacaacattaacaatcact

SEQ ID NO: 264 - DNA, 20 bp, synthetic construct
  misc_feature 1..20: note = Description of Artificial Sequence: Synthetic oligonucleotide
  source 1..20: mol_type = other DNA
accacagtatcacaatcaag

SEQ ID NO: 265 - DNA, 20 bp, synthetic construct
  misc_feature 1..20: note = Description of Artificial Sequence: Synthetic oligonucleotide
  source 1..20: mol_type = other DNA
gaccacagtatcacaatcaa

SEQ ID NO: 266 - DNA, 20 bp, synthetic construct
  misc_feature 1..20: note = Description of Artificial Sequence: Synthetic oligonucleotide
  source 1..20: mol_type = other DNA
tgaccacagtatcacaatca

SEQ ID NO: 267 - DNA, 20 bp, synthetic construct
  misc_feature 1..20: note = Description of Artificial Sequence: Synthetic oligonucleotide
  source 1..20: mol_type = other DNA
atgaccacagtatcacaatc

SEQ ID NO: 268 - DNA, 20 bp, synthetic construct
  misc_feature 1..20: note = Description of Artificial Sequence: Synthetic oligonucleotide
  source 1..20: mol_type = other DNA
catatgaccacagtatcaca

SEQ ID NO: 269 - DNA, 20 bp, synthetic construct
  misc_feature 1..20: note = Description of Artificial Sequence: Synthetic oligonucleotide
  source 1..20: mol_type = other DNA
gcatatgaccacagtatcac

SEQ ID NO: 270 - DNA, 20 bp, synthetic construct
  misc_feature 1..20: note = Description of Artificial Sequence: Synthetic oligonucleotide
  source 1..20: mol_type = other DNA
gacaaacacgggcatatgac

SEQ ID NO: 271 - DNA, 20 bp, synthetic construct
  misc_feature 1..20: note = Description of Artificial Sequence: Synthetic oligonucleotide
  source 1..20: mol_type = other DNA
tgacaaacacgggcatatga

SEQ ID NO: 272 - DNA, 20 bp, synthetic construct
  misc_feature 1..20: note = Description of Artificial Sequence: Synthetic oligonucleotide
  source 1..20: mol_type = other DNA
gttcatagtaaacatttttg

SEQ ID NO: 273 - DNA, 20 bp, synthetic construct
  misc_feature 1..20: note = Description of Artificial Sequence: Synthetic oligonucleotide
  source 1..20: mol_type = other DNA
gtgttcatagtaaacatttt

SEQ ID NO: 274 - DNA, 20 bp, synthetic construct
  misc_feature 1..20: note = Description of Artificial Sequence: Synthetic oligonucleotide
  source 1..20: mol_type = other DNA
tgtgttcatagtaaacattt

SEQ ID NO: 275 - DNA, 20 bp, synthetic construct
  misc_feature 1..20: note = Description of Artificial Sequence: Synthetic oligonucleotide
  source 1..20: mol_type = other DNA
tctgtgtgttcatagtaaac

SEQ ID NO: 276 - DNA, 20 bp, synthetic construct
  misc_feature 1..20: note = Description of Artificial Sequence: Synthetic oligonucleotide
  source 1..20: mol_type = other DNA
ttctgtgtgttcatagtaaa

SEQ ID NO: 277 - DNA, 20 bp, synthetic construct
  misc_feature 1..20: note = Description of Artificial Sequence: Synthetic oligonucleotide
  source 1..20: mol_type = other DNA
tatttctgtgtgttcatagt

SEQ ID NO: 278 - DNA, 20 bp, synthetic construct
  misc_feature 1..20: note = Description of Artificial Sequence: Synthetic oligonucleotide
  source 1..20: mol_type = other DNA
gatatatatgaatttagcct

SEQ ID NO: 279 - DNA, 20 bp, synthetic construct
  misc_feature 1..20: note = Description of Artificial Sequence: Synthetic oligonucleotide
  source 1..20: mol_type = other DNA
agatatatatgaatttagcc

SEQ ID NO: 280 - DNA, 20 bp, synthetic construct
  misc_feature 1..20: note = Description of Artificial Sequence: Synthetic oligonucleotide
  source 1..20: mol_type = other DNA
agacaaaagtatcaagatat

SEQ ID NO: 281 - DNA, 20 bp, synthetic construct
  misc_feature 1..20: note = Description of Artificial Sequence: Synthetic oligonucleotide
  source 1..20: mol_type = other DNA
agttgattggtctttaaaaa

SEQ ID NO: 282 - DNA, 20 bp, synthetic construct
  misc_feature 1..20: note = Description of Artificial Sequence: Synthetic oligonucleotide
  source 1..20: mol_type = other DNA
ccctataagttgattggtct

SEQ ID NO: 283 - DNA, 20 bp, synthetic construct
  misc_feature 1..20: note = Description of Artificial Sequence: Synthetic oligonucleotide
  source 1..20: mol_type = other DNA
aaaaagcctttgaattccct

SEQ ID NO: 284 - DNA, 20 bp, synthetic construct
  misc_feature 1..20: note = Description of Artificial Sequence: Synthetic oligonucleotide
  source 1..20: mol_type = other DNA
taaattttagtttggctgaa

SEQ ID NO: 285 - DNA, 20 bp, synthetic construct
  misc_feature 1..20: note = Description of Artificial Sequence: Synthetic oligonucleotide
  source 1..20: mol_type = other DNA
ttaaattttagtttggctga

SEQ ID NO: 286 - DNA, 20 bp, synthetic construct
  misc_feature 1..20: note = Description of Artificial Sequence: Synthetic oligonucleotide
  source 1..20: mol_type = other DNA
tttaaattttagtttggctg

SEQ ID NO: 287 - DNA, 20 bp, synthetic construct
  misc_feature 1..20: note = Description of Artificial Sequence: Synthetic oligonucleotide
  source 1..20: mol_type = other DNA
gtttaaattttagtttggct

SEQ ID NO: 288 - DNA, 20 bp, synthetic construct
  misc_feature 1..20: note = Description of Artificial Sequence: Synthetic oligonucleotide
  source 1..20: mol_type = other DNA
ttagagtcagttcaaattaa

SEQ ID NO: 289 - DNA, 20 bp, synthetic construct
  misc_feature 1..20: note = Description of Artificial Sequence: Synthetic oligonucleotide
  source 1..20: mol_type = other DNA
tttagagtcagttcaaatta

SEQ ID NO: 290 - DNA, 20 bp, synthetic construct
  misc_feature 1..20: note = Description of Artificial Sequence: Synthetic oligonucleotide
  source 1..20: mol_type = other DNA
ttttagagtcagttcaaatt

SEQ ID NO: 291 - DNA, 20 bp, synthetic construct
  misc_feature 1..20: note = Description of Artificial Sequence: Synthetic oligonucleotide
  source 1..20: mol_type = other DNA
tcatttttagagtcagttca

SEQ ID NO: 292 - DNA, 20 bp, synthetic construct
  misc_feature 1..20: note = Description of Artificial Sequence: Synthetic oligonucleotide
  source 1..20: mol_type = other DNA
ttcatttttagagtcagttc

SEQ ID NO: 293 - DNA, 20 bp, synthetic construct
  misc_feature 1..20: note = Description of Artificial Sequence: Synthetic oligonucleotide
  source 1..20: mol_type = other DNA
gttcacaaagggaaaaatac

SEQ ID NO: 294 - DNA, 20 bp, synthetic construct
  misc_feature 1..20: note = Description of Artificial Sequence: Synthetic oligonucleotide
  source 1..20: mol_type = other DNA
ctgctccttgtaaaatttgt

SEQ ID NO: 295 - DNA, 20 bp, synthetic construct
  misc_feature 1..20: note = Description of Artificial Sequence: Synthetic oligonucleotide
  source 1..20: mol_type = other DNA
gctgctccttgtaaaatttg

SEQ ID NO: 296 - DNA, 20 bp, synthetic construct
  misc_feature 1..20: note = Description of Artificial Sequence: Synthetic oligonucleotide
  source 1..20: mol_type = other DNA
tgtttattaaataggctgct

SEQ ID NO: 297 - DNA, 20 bp, synthetic construct
  misc_feature 1..20: note = Description of Artificial Sequence: Synthetic oligonucleotide
  source 1..20: mol_type = other DNA
gtgtttattaaataggctgc

SEQ ID NO: 298 - DNA, 20 bp, synthetic construct
  misc_feature 1..20: note = Description of Artificial Sequence: Synthetic oligonucleotide
  source 1..20: mol_type = other DNA
tagtgtttattaaataggct

SEQ ID NO: 299 - DNA, 20 bp, synthetic construct
  misc_feature 1..20: note = Description of Artificial Sequence: Synthetic oligonucleotide
  source 1..20: mol_type = other DNA
ctagtgtttattaaataggc

SEQ ID NO: 300 - DNA, 20 bp, synthetic construct
  misc_feature 1..20: note = Description of Artificial Sequence: Synthetic oligonucleotide
  source 1..20: mol_type = other DNA
gctagtgtttattaaatagg

SEQ ID NO: 301 - DNA, 20 bp, synthetic construct
  misc_feature 1..20: note = Description of Artificial Sequence: Synthetic oligonucleotide
  source 1..20: mol_type = other DNA
aaagcctatactttgtttaa

SEQ ID NO: 302 - DNA, 20 bp, synthetic construct
  misc_feature 1..20: note = Description of Artificial Sequence: Synthetic oligonucleotide
  source 1..20: mol_type = other DNA
tcagctgaaaagcctatact

SEQ ID NO: 303 - DNA, 20 bp, synthetic construct
  misc_feature 1..20: note = Description of Artificial Sequence: Synthetic oligonucleotide
  source 1..20: mol_type = other DNA
atcagctgaaaagcctatac

SEQ ID NO: 304 - DNA, 20 bp, synthetic construct
  misc_feature 1..20: note = Description of Artificial Sequence: Synthetic oligonucleotide
  source 1..20: mol_type = other DNA
tatcagctgaaaagcctata

SEQ ID NO: 305 - DNA, 20 bp, synthetic construct
  misc_feature 1..20: note = Description of Artificial Sequence: Synthetic oligonucleotide
  source 1..20: mol_type = other DNA
gtatcagctgaaaagcctat

SEQ ID NO: 306 - DNA, 20 bp, synthetic construct
  misc_feature 1..20: note = Description of Artificial Sequence: Synthetic oligonucleotide
  source 1..20: mol_type = other DNA
ggtatcagctgaaaagccta

SEQ ID NO: 307 - DNA, 20 bp, synthetic construct
  misc_feature 1..20: note = Description of Artificial Sequence: Synthetic oligonucleotide
  source 1..20: mol_type = other DNA
tgtatatccacagaaactta

SEQ ID NO: 308 - DNA, 20 bp, synthetic construct
  misc_feature 1..20: note = Description of Artificial Sequence: Synthetic oligonucleotide
  source 1..20: mol_type = other DNA
ctttttgctgtatatccaca

SEQ ID NO: 309 - DNA, 20 bp, synthetic construct
  misc_feature 1..20: note = Description of Artificial Sequence: Synthetic oligonucleotide
  source 1..20: mol_type = other DNA
tctttttgctgtatatccac

SEQ ID NO: 310 - DNA, 20 bp, synthetic construct
  misc_feature 1..20: note = Description of Artificial Sequence: Synthetic oligonucleotide
  source 1..20: mol_type = other DNA
ctctttttgctgtatatcca

SEQ ID NO: 311 - DNA, 20 bp, synthetic construct
  misc_feature 1..20: note = Description of Artificial Sequence: Synthetic oligonucleotide
  source 1..20: mol_type = other DNA
tctctttttgctgtatatcc

SEQ ID NO: 312 - DNA, 20 bp, synthetic construct
  misc_feature 1..20: note = Description of Artificial Sequence: Synthetic oligonucleotide
  source 1..20: mol_type = other DNA
atctctttttgctgtatatc

SEQ ID NO: 313 - DNA, 20 bp, synthetic construct
  misc_feature 1..20: note = Description of Artificial Sequence: Synthetic oligonucleotide
  source 1..20: mol_type = other DNA
atatctctttttgctgtata

SEQ ID NO: 314 - DNA, 20 bp, synthetic construct
  misc_feature 1..20: note = Description of Artificial Sequence: Synthetic oligonucleotide
  source 1..20: mol_type = other DNA
tatatctctttttgctgtat

SEQ ID NO: 315 - DNA, 20 bp, synthetic construct
  misc_feature 1..20: note = Description of Artificial Sequence: Synthetic oligonucleotide
  source 1..20: mol_type = other DNA
ttatatctctttttgctgta

SEQ ID NO: 316 - DNA, 20 bp, synthetic construct
  misc_feature 1..20: note = Description of Artificial Sequence: Synthetic oligonucleotide
  source 1..20: mol_type = other DNA
attatatctctttttgctgt

SEQ ID NO: 317 - DNA, 20 bp, synthetic construct
  misc_feature 1..20: note = Description of Artificial Sequence: Synthetic oligonucleotide
  source 1..20: mol_type = other DNA
aattatatctctttttgctg

SEQ ID NO: 318 - DNA, 20 bp, synthetic construct
  misc_feature 1..20: note = Description of Artificial Sequence: Synthetic oligonucleotide
  source 1..20: mol_type = other DNA
ggtaaagagctatgcacaga

SEQ ID NO: 319 - DNA, 20 bp, synthetic construct
  misc_feature 1..20: note = Description of Artificial Sequence: Synthetic oligonucleotide
  source 1..20: mol_type = other DNA
gggtaaagagctatgcacag

SEQ ID NO: 320 - DNA, 20 bp, synthetic construct
  misc_feature 1..20: note = Description of Artificial Sequence: Synthetic oligonucleotide
  source 1..20: mol_type = other DNA
agggtaaagagctatgcaca

SEQ ID NO: 321 - DNA, 20 bp, synthetic construct
  misc_feature 1..20: note = Description of Artificial Sequence: Synthetic oligonucleotide
  source 1..20: mol_type = other DNA
cagggtaaagagctatgcac

SEQ ID NO: 322 - DNA, 20 bp, synthetic construct
  misc_feature 1..20: note = Description of Artificial Sequence: Synthetic oligonucleotide
  source 1..20: mol_type = other DNA
acagggtaaagagctatgca

SEQ ID NO: 323 - DNA, 20 bp, synthetic construct
  misc_feature 1..20: note = Description of Artificial Sequence: Synthetic oligonucleotide
  source 1..20: mol_type = other DNA
aacacagggtaaagagctat

SEQ ID NO: 324 - DNA, 20 bp, synthetic construct
  misc_feature 1..20: note = Description of Artificial Sequence: Synthetic oligonucleotide
  source 1..20: mol_type = other DNA
gccaagctctattaacaata

SEQ ID NO: 325 - DNA, 20 bp, synthetic construct
  misc_feature 1..20: note = Description of Artificial Sequence: Synthetic oligonucleotide
  source 1..20: mol_type = other DNA
tgccaagctctattaacaat

SEQ ID NO: 326 - DNA, 20 bp, synthetic construct
  misc_feature 1..20: note = Description of Artificial Sequence: Synthetic oligonucleotide
  source 1..20: mol_type = other DNA
ttgccaagctctattaacaa

SEQ ID NO: 327 - DNA, 20 bp, synthetic construct
  misc_feature 1..20: note = Description of Artificial Sequence: Synthetic oligonucleotide
  source 1..20: mol_type = other DNA
tttgccaagctctattaaca

SEQ ID NO: 328 - DNA, 20 bp, synthetic construct
  misc_feature 1..20: note = Description of Artificial Sequence: Synthetic oligonucleotide
  source 1..20: mol_type = other DNA
ataatttgccaagctctatt

SEQ ID NO: 329 - DNA, 20 bp, synthetic construct
  misc_feature 1..20: note = Description of Artificial Sequence: Synthetic oligonucleotide
  source 1..20: mol_type = other DNA
tataatttgccaagctctat

SEQ ID NO: 330 - DNA, 20 bp, synthetic construct
  misc_feature 1..20: note = Description of Artificial Sequence: Synthetic oligonucleotide
  source 1..20: mol_type = other DNA
ttataatttgccaagctcta

SEQ ID NO: 331 - DNA, 20 bp, synthetic construct
  misc_feature 1..20: note = Description of Artificial Sequence: Synthetic oligonucleotide
  source 1..20: mol_type = other DNA
atttataatttgccaagctc

SEQ ID NO: 332 - DNA, 20 bp, synthetic construct
  misc_feature 1..20: note = Description of Artificial Sequence: Synthetic oligonucleotide
  source 1..20: mol_type = other DNA
tatttataatttgccaagct

SEQ ID NO: 333 - DNA, 20 bp, synthetic construct
  misc_feature 1..20: note = Description of Artificial Sequence: Synthetic oligonucleotide
  source 1..20: mol_type = other DNA
ttatttataatttgccaagc

SEQ ID NO: 334 - DNA, 20 bp, synthetic construct
  misc_feature 1..20: note = Description of Artificial Sequence: Synthetic oligonucleotide
  source 1..20: mol_type = other DNA
acttctatctaaccatatac

SEQ ID NO: 335 - DNA, 20 bp, synthetic construct
  misc_feature 1..20: note = Description of Artificial Sequence: Synthetic oligonucleotide
  source 1..20: mol_type = other DNA
gtcacttctatctaaccata

SEQ ID NO: 336 - DNA, 20 bp, synthetic construct
  misc_feature 1..20: note = Description of Artificial Sequence: Synthetic oligonucleotide
  source 1..20: mol_type = other DNA
agtcacttctatctaaccat

SEQ ID NO: 337 - DNA, 20 bp, synthetic construct
  misc_feature 1..20: note = Description of Artificial Sequence: Synthetic oligonucleotide
  source 1..20: mol_type = other DNA
tagtcacttctatctaacca

SEQ ID NO: 338 - DNA, 20 bp, synthetic construct
  misc_feature 1..20: note = Description of Artificial Sequence: Synthetic oligonucleotide
  source 1..20: mol_type = other DNA
atagtcacttctatctaacc

SEQ ID NO: 339 - DNA, 20 bp, synthetic construct
  misc_feature 1..20: note = Description of Artificial Sequence: Synthetic oligonucleotide
  source 1..20: mol_type = other DNA
tatagtcacttctatctaac

SEQ ID NO: 340 - DNA, 20 bp, synthetic construct
  misc_feature 1..20: note = Description of Artificial Sequence: Synthetic oligonucleotide
  source 1..20: mol_type = other DNA
ttatagtcacttctatctaa

SEQ ID NO: 341 - DNA, 20 bp, synthetic construct
  misc_feature 1..20: note = Description of Artificial Sequence: Synthetic oligonucleotide
  source 1..20: mol_type = other DNA
attatagtcacttctatcta

SEQ ID NO: 342 - DNA, 20 bp, synthetic construct
  misc_feature 1..20: note = Description of Artificial Sequence: Synthetic oligonucleotide
  source 1..20: mol_type = other DNA
cattatagtcacttctatct

SEQ ID NO: 343 - DNA, 20 bp, synthetic construct
  misc_feature 1..20: note = Description of Artificial Sequence: Synthetic oligonucleotide
  source 1..20: mol_type = other DNA
gcattatagtcacttctatc

SEQ ID NO: 344 - DNA, 20 bp, synthetic construct
  misc_feature 1..20: note = Description of Artificial Sequence: Synthetic oligonucleotide
  source 1..20: mol_type = other DNA
tgcattatagtcacttctat

SEQ ID NO: 345 - DNA, 20 bp, synthetic construct
  misc_feature 1..20: note = Description of Artificial Sequence: Synthetic oligonucleotide
  source 1..20: mol_type = other DNA
gtgcattatagtcacttcta

SEQ ID NO: 346 - DNA, 20 bp, synthetic construct
  misc_feature 1..20: note = Description of Artificial Sequence: Synthetic oligonucleotide
  source 1..20: mol_type = other DNA
gggctctgtgtgtctatata

SEQ ID NO: 347 - DNA, 20 bp, synthetic construct
  misc_feature 1..20: note = Description of Artificial Sequence: Synthetic oligonucleotide
  source 1..20: mol_type = other DNA
agggctctgtgtgtctatat

SEQ ID NO: 348 - DNA, 20 bp, synthetic construct
  misc_feature 1..20: note = Description of Artificial Sequence: Synthetic oligonucleotide
  source 1..20: mol_type = other DNA
aagggctctgtgtgtctata

SEQ ID NO: 349 - DNA, 20 bp, synthetic construct
  misc_feature 1..20: note = Description of Artificial Sequence: Synthetic oligonucleotide
  source 1..20: mol_type = other DNA
gaagggctctgtgtgtctat

SEQ ID NO: 350 - DNA, 20 bp, synthetic construct
  misc_feature 1..20: note = Description of Artificial Sequence: Synthetic oligonucleotide
  source 1..20: mol_type = other DNA
tgaagggctctgtgtgtcta

SEQ ID NO: 351 - DNA, 20 bp, synthetic construct
  misc_feature 1..20: note = Description of Artificial Sequence: Synthetic oligonucleotide
  source 1..20: mol_type = other DNA
actgaagggctctgtgtgtc

SEQ ID NO: 352 - DNA, 20 bp, synthetic construct
  misc_feature 1..20: note = Description of Artificial Sequence: Synthetic oligonucleotide
  source 1..20: mol_type = other DNA
gaactgaagggctctgtgtg

SEQ ID NO: 353 - DNA, 20 bp, synthetic construct
  misc_feature 1..20: note = Description of Artificial Sequence: Synthetic oligonucleotide
  source 1..20: mol_type = other DNA
tgaactgaagggctctgtgt

SEQ ID NO: 354 - DNA, 20 bp, synthetic construct
  misc_feature 1..20: note = Description of Artificial Sequence: Synthetic oligonucleotide
  source 1..20: mol_type = other DNA
ctgaactgaagggctctgtg

SEQ ID NO: 355 - DNA, 20 bp, synthetic construct
  misc_feature 1..20: note = Description of Artificial Sequence: Synthetic oligonucleotide
  source 1..20: mol_type = other DNA
cctgaactgaagggctctgt

SEQ ID NO: 356 - DNA, 20 bp, synthetic construct
  misc_feature 1..20: note = Description of Artificial Sequence: Synthetic oligonucleotide
  source 1..20: mol_type = other DNA
aaattgtacctgaactgaag

SEQ ID NO: 357 - DNA, 20 bp, synthetic construct
  misc_feature 1..20: note = Description of Artificial Sequence: Synthetic oligonucleotide
  source 1..20: mol_type = other DNA
caaattgtacctgaactgaa

SEQ ID NO: 358 - DNA, 20 bp, synthetic construct
  misc_feature 1..20: note = Description of Artificial Sequence: Synthetic oligonucleotide
  source 1..20: mol_type = other DNA
gcaaattgtacctgaactga

SEQ ID NO: 359 - DNA, 20 bp, synthetic construct
  misc_feature 1..20: note = Description of Artificial Sequence: Synthetic oligonucleotide
  source 1..20: mol_type = other DNA
cgcaaattgtacctgaactg

SEQ ID NO: 360 - DNA, 20 bp, synthetic construct
  misc_feature 1..20: note = Description of Artificial Sequence: Synthetic oligonucleotide
  source 1..20: mol_type = other DNA
gcgcaaattgtacctgaact

SEQ ID NO: 361 - DNA, 20 bp, synthetic construct
  misc_feature 1..20: note = Description of Artificial Sequence: Synthetic oligonucleotide
  source 1..20: mol_type = other DNA
ataaatgctgacttagaaag

SEQ ID NO: 362 - DNA, 20 bp, synthetic construct
  misc_feature 1..20: note = Description of Artificial Sequence: Synthetic oligonucleotide
  source 1..20: mol_type = other DNA
aaataaatgctgacttagaa

SEQ ID NO: 363 - DNA, 20 bp, synthetic construct
  misc_feature 1..20: note = Description of Artificial Sequence: Synthetic oligonucleotide
  source 1..20: mol_type = other DNA
aaaataaatgctgacttaga

SEQ ID NO: 364 - DNA, 20 bp, synthetic construct
  misc_feature 1..20: note = Description of Artificial Sequence: Synthetic oligonucleotide
  source 1..20: mol_type = other DNA
gtgggtaaacagccacaaaa

SEQ ID NO: 365 - DNA, 20 bp, synthetic construct
  misc_feature 1..20: note = Description of Artificial Sequence: Synthetic oligonucleotide
  source 1..20: mol_type = other DNA
tgtgggtaaacagccacaaa

SEQ ID NO: 366 - DNA, 20 bp, synthetic construct
  misc_feature 1..20: note = Description of Artificial Sequence: Synthetic oligonucleotide
  source 1..20: mol_type = other DNA
attgtgggtaaacagccaca

SEQ ID NO: 367 - DNA, 20 bp, synthetic construct
  misc_feature 1..20: note = Description of Artificial Sequence: Synthetic oligonucleotide
  source 1..20: mol_type = other DNA
cattgtgggtaaacagccac

SEQ ID NO: 368 - DNA, 20 bp, synthetic construct
  misc_feature 1..20: note = Description of Artificial Sequence: Synthetic oligonucleotide
  source 1..20: mol_type = other DNA
tcattgtgggtaaacagcca

SEQ ID NO: 369 - DNA, 20 bp, synthetic construct
  misc_feature 1..20: note = Description of Artificial Sequence: Synthetic oligonucleotide
  source 1..20: mol_type = other DNA
ttcattgtgggtaaacagcc

SEQ ID NO: 370 - DNA, 20 bp, synthetic construct
  misc_feature 1..20: note = Description of Artificial Sequence: Synthetic oligonucleotide
  source 1..20: mol_type = other DNA
tttcattgtgggtaaacagc

SEQ ID NO: 371 - DNA, 20 bp, synthetic construct
  misc_feature 1..20: note = Description of Artificial Sequence: Synthetic oligonucleotide
  source 1..20: mol_type = other DNA
ctttcattgtgggtaaacag

SEQ ID NO: 372 - DNA, 20 bp, synthetic construct
  misc_feature 1..20: note = Description of Artificial Sequence: Synthetic oligonucleotide
  source 1..20: mol_type = other DNA
tctttcattgtgggtaaaca

SEQ ID NO: 373 - DNA, 20 bp, synthetic construct
  misc_feature 1..20: note = Description of Artificial Sequence: Synthetic oligonucleotide
  source 1..20: mol_type = other DNA
ctctttcattgtgggtaaac

SEQ ID NO: 374 - DNA, 20 bp, synthetic construct
  misc_feature 1..20: note = Description of Artificial Sequence: Synthetic oligonucleotide
  source 1..20: mol_type = other DNA
actctttcattgtgggtaaa

SEQ ID NO: 375 - DNA, 20 bp, synthetic construct
  misc_feature 1..20: note = Description of Artificial Sequence: Synthetic oligonucleotide
  source 1..20: mol_type = other DNA
aactctttcattgtgggtaa

SEQ ID NO: 376 - DNA, 20 bp, synthetic construct
  misc_feature 1..20: note = Description of Artificial Sequence: Synthetic oligonucleotide
  source 1..20: mol_type = other DNA
gaactctttcattgtgggta

SEQ ID NO: 377 - DNA, 20 bp, synthetic construct
  misc_feature 1..20: note = Description of Artificial Sequence: Synthetic oligonucleotide
  source 1..20: mol_type = other DNA
agaactctttcattgtgggt

SEQ ID NO: 378 - DNA, 20 bp, synthetic construct
  misc_feature 1..20: note = Description of Artificial Sequence: Synthetic oligonucleotide
  source 1..20: mol_type = other DNA
tagaactctttcattgtggg

SEQ ID NO: 379 - DNA, 20 bp, synthetic construct
  misc_feature 1..20: note = Description of Artificial Sequence: Synthetic oligonucleotide
  source 1..20: mol_type = other DNA
ttagaactctttcattgtgg

SEQ ID NO: 380 - DNA, 20 bp, synthetic construct
  misc_feature 1..20: note = Description of Artificial Sequence: Synthetic oligonucleotide
  source 1..20: mol_type = other DNA
ctttattagaactctttcat

SEQ ID NO: 381 - DNA, 20 bp, synthetic construct
  misc_feature 1..20: note = Description of Artificial Sequence: Synthetic oligonucleotide
  source 1..20: mol_type = other DNA
acatctttattagaactctt

SEQ ID NO: 382 - DNA, 20 bp, synthetic construct
  misc_feature 1..20: note = Description of Artificial Sequence: Synthetic oligonucleotide
  source 1..20: mol_type = other DNA
gcacatctttattagaactc

SEQ ID NO: 383 - DNA, 20 bp, synthetic construct
  misc_feature 1..20: note = Description of Artificial Sequence: Synthetic oligonucleotide
  source 1..20: mol_type = other DNA
cagcacatctttattagaac

SEQ ID NO: 384 - DNA, 20 bp, synthetic construct
  misc_feature 1..20: note = Description of Artificial Sequence: Synthetic oligonucleotide
  source 1..20: mol_type = other DNA
tcagcacatctttattagaa

SEQ ID NO: 385 - DNA, 20 bp, synthetic construct
  misc_feature 1..20: note = Description of Artificial Sequence: Synthetic oligonucleotide
  source 1..20: mol_type = other DNA
  misc_feature join(1,3,5,7,9,11,13,15,17,19): note = RNA residue
  misc_feature join(2,4,6,8,10,12,14,16,18,20): note = DNA residue
agcgatcgaggcggctatag

SEQ ID NO: 386 - DNA, 20 bp, synthetic construct
  modified_base 7: mod_base = OTHER; note = Uracil
  misc_feature 1..20: note = Description of Combined DNA/RNA Molecule: Synthetic oligonucleotide
  source 1..20: mol_type = other DNA
  modified_base 17: mod_base = OTHER; note = Uracil
  modified_base 19: mod_base = OTHER; note = Uracil
  misc_feature join(1,3,5,7,9,11,13,15,17,19): note = RNA residue
  misc_feature join(2,4,6,8,10,12,14,16,18,20): note = DNA residue
cagcgatcgaggcggctata

SEQ ID NO: 387 - DNA, 20 bp, synthetic construct
  misc_feature 1..20: note = Description of Artificial Sequence: Synthetic oligonucleotide
  source 1..20: mol_type = other DNA
  misc_feature join(1,3,5,7,9,11,13,15,17,19): note = RNA residue
  misc_feature join(2,4,6,8,10,12,14,16,18,20): note = DNA residue
acagcgatcgaggcggctat

SEQ ID NO: 388 - DNA, 20 bp, synthetic construct
  misc_feature 1..20: note = Description of Artificial Sequence: Synthetic oligonucleotide
  misc_feature 1..20: note = Description of Combined DNA/RNA Molecule: Synthetic oligonucleotide
  source 1..20: mol_type = other DNA
  modified_base 19: mod_base = OTHER; mod_base = OTHER; note = Uracil
  modified_base 9: mod_base = OTHER; note = Uracil
  misc_feature join(1,3,5,7,9,11,13,15,17,19): note = RNA residue
  misc_feature join(2,4,6,8,10,12,14,16,18,20): note = DNA residue
gacagcgatcgaggcggcta

SEQ ID NO: 389 - DNA, 20 bp, synthetic construct
  misc_feature 1..20: note = Description of Artificial Sequence: Synthetic oligonucleotide
  source 1..20: mol_type = other DNA
  misc_feature join(1,3,5,7,9,11,13,15,17,19): note = RNA residue
  misc_feature join(2,4,6,8,10,12,14,16,18,20): note = DNA residue
agacagcgatcgaggcggct

SEQ ID NO: 390 - DNA, 20 bp, synthetic construct
  misc_feature 1..20: note = Description of Artificial Sequence: Synthetic oligonucleotide
  source 1..20: mol_type = other DNA
  misc_feature join(1,3,5,7,9,11,13,15,17,19): note = RNA residue
  misc_feature join(2,4,6,8,10,12,14,16,18,20): note = DNA residue
gcagcagtcacagcagcagc

SEQ ID NO: 391 - DNA, 20 bp, synthetic construct
  misc_feature 1..20: note = Description of Artificial Sequence: Synthetic oligonucleotide
  source 1..20: mol_type = other DNA
  misc_feature join(1,3,5,7,9,11,13,15,17,19): note = RNA residue
  misc_feature join(2,4,6,8,10,12,14,16,18,20): note = DNA residue
cgcagcagcagtcacagcag

SEQ ID NO: 392 - DNA, 20 bp, synthetic construct
  misc_feature 1..20: note = Description of Artificial Sequence: Synthetic oligonucleotide
  misc_feature 1..20: note = Description of Combined DNA/RNA Molecule: Synthetic oligonucleotide
  source 1..20: mol_type = other DNA
  modified_base 1: mod_base = OTHER; note = Uracil
  modified_base 13: mod_base = OTHER; note = Uracil
  misc_feature join(1,3,5,7,9,11,13,15,17,19): note = RNA residue
  misc_feature join(2,4,6,8,10,12,14,16,18,20): note = DNA residue
tcgcagcagcagtcacagca

SEQ ID NO: 393 - DNA, 20 bp, synthetic construct
  misc_feature 1..20: note = Description of Artificial Sequence: Synthetic oligonucleotide
  source 1..20: mol_type = other DNA
  misc_feature join(1,3,5,7,9,11,13,15,17,19): note = RNA residue
  misc_feature join(2,4,6,8,10,12,14,16,18,20): note = DNA residue
ctcgcagcagcagtcacagc

SEQ ID NO: 394 - DNA, 20 bp, synthetic construct
  misc_feature 1..20: note = Description of Artificial Sequence: Synthetic oligonucleotide
  misc_feature 1..20: note = Description of Combined DNA/RNA Molecule: Synthetic oligonucleotide
  source 1..20: mol_type = other DNA
  modified_base 1: mod_base = OTHER; note = Uracil
  modified_base 3: mod_base = OTHER; note = Uracil
  modified_base 15: mod_base = OTHER; note = Uracil
  misc_feature join(1,3,5,7,9,11,13,15,17,19): note = RNA residue
  misc_feature join(2,4,6,8,10,12,14,16,18,20): note = DNA residue
tctcgcagcagcagtcacag

SEQ ID NO: 395 - DNA, 20 bp, synthetic construct
  misc_feature 1..20: note = Description of Artificial Sequence: Synthetic oligonucleotide
  source 1..20: mol_type = other DNA
  misc_feature join(1,3,5,7,9,11,13,15,17,19): note = RNA residue
  misc_feature join(2,4,6,8,10,12,14,16,18,20): note = DNA residue
ctctcgcagcagcagtcaca

SEQ ID NO: 396 - DNA, 20 bp, synthetic construct
  misc_feature 1..20: note = Description of Artificial Sequence: Synthetic oligonucleotide
  misc_feature 1..20: note = Description of Combined DNA/RNA Molecule: Synthetic oligonucleotide
  source 1..20: mol_type = other DNA
  modified_base 3: mod_base = OTHER; note = Uracil
  modified_base 5: mod_base = OTHER; note = Uracil
  modified_base 17: mod_base = OTHER; note = Uracil
  misc_feature join(1,3,5,7,9,11,13,15,17,19): note = RNA residue
  misc_feature join(2,4,6,8,10,12,14,16,18,20): note = DNA residue
cctctcgcagcagcagtcac

SEQ ID NO: 397 - DNA, 20 bp, synthetic construct
  misc_feature 1..20: note = Description of Artificial Sequence: Synthetic oligonucleotide
  misc_feature 1..20: note = Description of Combined DNA/RNA Molecule: Synthetic oligonucleotide
  source 1..20: mol_type = other DNA
  modified_base 1: mod_base = OTHER; note = Uracil
  misc_feature join(1,3,5,7,9,11,13,15,17,19): note = RNA residue
  misc_feature join(2,4,6,8,10,12,14,16,18,20): note = DNA residue
tcctctcgcagcagcagtca

SEQ ID NO: 398 - DNA, 20 bp, synthetic construct
  misc_feature 1..20: note = Description of Artificial Sequence: Synthetic oligonucleotide
  misc_feature 1..20: note = Description of Combined DNA/RNA Molecule: Synthetic oligonucleotide
  source 1..20: mol_type = other DNA
  modified_base 5: mod_base = OTHER; note = Uracil
  modified_base 7: mod_base = OTHER; note = Uracil
  modified_base 19: mod_base = OTHER; note = Uracil
  misc_feature join(1,3,5,7,9,11,13,15,17,19): note = RNA residue
  misc_feature join(2,4,6,8,10,12,14,16,18,20): note = DNA residue
ctcctctcgcagcagcagtc

SEQ ID NO: 399 - DNA, 20 bp, synthetic construct
  misc_feature 1..20: note = Description of Artificial Sequence: Synthetic oligonucleotide
  misc_feature 1..20: note = Description of Combined DNA/RNA Molecule: Synthetic oligonucleotide
  source 1..20: mol_type = other DNA
  modified_base 3: mod_base = OTHER; note = Uracil
  misc_feature join(1,3,5,7,9,11,13,15,17,19): note = RNA residue
  misc_feature join(2,4,6,8,10,12,14,16,18,20): note = DNA residue
cctcctctcgcagcagcagt

SEQ ID NO: 400 - DNA, 20 bp, synthetic construct
  misc_feature 1..20: note = Description of Artificial Sequence: Synthetic oligonucleotide
  misc_feature 1..20: note = Description of Combined DNA/RNA Molecule: Synthetic oligonucleotide
  source 1..20: mol_type = other DNA
  modified_base 1: mod_base = OTHER; note = Uracil
  modified_base 7: mod_base = OTHER; note = Uracil
  modified_base 9: mod_base = OTHER; note = Uracil
  misc_feature join(1,3,5,7,9,11,13,15,17,19): note = RNA residue
  misc_feature join(2,4,6,8,10,12,14,16,18,20): note = DNA residue
tcctcctctcgcagcagcag

SEQ ID NO: 401 - DNA, 20 bp, synthetic construct
  misc_feature 1..20: note = Description of Artificial Sequence: Synthetic oligonucleotide
  misc_feature 1..20: note = Description of Combined DNA/RNA Molecule: Synthetic oligonucleotide
  source 1..20: mol_type = other DNA
  modified_base 5: mod_base = OTHER; note = Uracil
  misc_feature join(1,3,5,7,9,11,13,15,17,19): note = RNA residue
  misc_feature join(2,4,6,8,10,12,14,16,18,20): note = DNA residue
ctcctcctctcgcagcagca

SEQ ID NO: 402 - DNA, 20 bp, synthetic construct
  misc_feature 1..20: note = Description of Artificial Sequence: Synthetic oligonucleotide
  misc_feature 1..20: note = Description of Combined DNA/RNA Molecule: Synthetic oligonucleotide
  source 1..20: mol_type = other DNA
  modified_base 1: mod_base = OTHER; note = Uracil
  modified_base 7: mod_base = OTHER; note = Uracil
  misc_feature join(1,3,5,7,9,11,13,15,17,19): note = RNA residue
  misc_feature join(2,4,6,8,10,12,14,16,18,20): note = DNA residue
tcctcctcctctcgcagcag

SEQ ID NO: 403 - DNA, 20 bp, synthetic construct
  misc_feature 1..20: note = Description of Artificial Sequence: Synthetic oligonucleotide
  misc_feature 1..20: note = Description of Combined DNA/RNA Molecule: Synthetic oligonucleotide
  source 1..20: mol_type = other DNA
  modified_base 5: mod_base = OTHER; note = Uracil
  modified_base 11: mod_base = OTHER; note = Uracil
  modified_base 13: mod_base = OTHER; note = Uracil
  misc_feature join(1,3,5,7,9,11,13,15,17,19): note = RNA residue
  misc_feature join(2,4,6,8,10,12,14,16,18,20): note = DNA residue
ctcctcctcctctcgcagca

SEQ ID NO: 404 - DNA, 20 bp, synthetic construct
  misc_feature 1..20: note = Description of Artificial Sequence: Synthetic oligonucleotide
  misc_feature 1..20: note = Description of Combined DNA/RNA Molecule: Synthetic oligonucleotide
  source 1..20: mol_type = other DNA
  modified_base 1: mod_base = OTHER; note = Uracil
  modified_base 7: mod_base = OTHER; note = Uracil
  modified_base 13: mod_base = OTHER; note = Uracil
  modified_base 15: mod_base = OTHER; note = Uracil
  misc_feature join(1,3,5,7,9,11,13,15,17,19): note = RNA residue
  misc_feature join(2,4,6,8,10,12,14,16,18,20): note = DNA residue
tcctcctcctcctctcgcag

SEQ ID NO: 405 - DNA, 20 bp, synthetic construct
  misc_feature 1..20: note = Description of Artificial Sequence: Synthetic oligonucleotide
  misc_feature 1..20: note = Description of Combined DNA/RNA Molecule: Synthetic oligonucleotide
  source 1..20: mol_type = other DNA
  modified_base 5: mod_base = OTHER; note = Uracil
  modified_base 11: mod_base = OTHER; note = Uracil
  misc_feature join(1,3,5,7,9,11,13,15,17,19): note = RNA residue
  misc_feature join(2,4,6,8,10,12,14,16,18,20): note = DNA residue
ctcctcctcctcctctcgca

SEQ ID NO: 406 - DNA, 20 bp, synthetic construct
  misc_feature 1..20: note = Description of Artificial Sequence: Synthetic oligonucleotide
  misc_feature 1..20: note = Description of Combined DNA/RNA Molecule: Synthetic oligonucleotide
  source 1..20: mol_type = other DNA
  modified_base 3: mod_base = OTHER; note = Uracil
  modified_base 7: mod_base = OTHER; note = Uracil
  modified_base 13: mod_base = OTHER; note = Uracil
  modified_base 19: mod_base = OTHER; note = Uracil
  misc_feature join(1,3,5,7,9,11,13,15,17,19): note = RNA residue
  misc_feature join(2,4,6,8,10,12,14,16,18,20): note = DNA residue
gctgcttcctcctcctcctc

SEQ ID NO: 407 - DNA, 20 bp, synthetic construct
  misc_feature 1..20: note = Description of Artificial Sequence: Synthetic oligonucleotide
  misc_feature 1..20: note = Description of Combined DNA/RNA Molecule: Synthetic oligonucleotide
  source 1..20: mol_type = other DNA
  modified_base 7: mod_base = OTHER; note = Uracil
  modified_base 11: mod_base = OTHER; note = Uracil
  modified_base 17: mod_base = OTHER; note = Uracil
  misc_feature join(1,3,5,7,9,11,13,15,17,19): note = RNA residue
  misc_feature join(2,4,6,8,10,12,14,16,18,20): note = DNA residue
cgctgcttcctcctcctcct

SEQ ID NO: 408 - DNA, 20 bp, synthetic construct
  misc_feature 1..20: note = Description of Artificial Sequence: Synthetic oligonucleotide
  misc_feature 1..20: note = Description of Combined DNA/RNA Molecule: Synthetic oligonucleotide
  source 1..20: mol_type = other DNA
  modified_base 1: mod_base = OTHER; note = Uracil
  modified_base 3: mod_base = OTHER; note = Uracil
  modified_base 7: mod_base = OTHER; note = Uracil
  modified_base 9: mod_base = OTHER; note = Uracil
  modified_base 13: mod_base = OTHER; note = Uracil
  modified_base 15: mod_base = OTHER; note = Uracil
  misc_feature join(1,3,5,7,9,11,13,15,17,19): note = RNA residue
  misc_feature join(2,4,6,8,10,12,14,16,18,20): note = DNA residue
tgtacttcttggtctccccc

SEQ ID NO: 409 - DNA, 20 bp, synthetic construct
  misc_feature 1..20: note = Description of Artificial Sequence: Synthetic oligonucleotide
  misc_feature 1..20: note = Description of Combined DNA/RNA Molecule: Synthetic oligonucleotide
  source 1..20: mol_type = other DNA
  modified_base 7: mod_base = OTHER; note = Uracil
  modified_base 11: mod_base = OTHER; note = Uracil
  misc_feature join(1,3,5,7,9,11,13,15,17,19): note = RNA residue
  misc_feature join(2,4,6,8,10,12,14,16,18,20): note = DNA residue
ctgtacttcttggtctcccc

SEQ ID NO: 410 - DNA, 20 bp, synthetic construct
  misc_feature 1..20: note = Description of Artificial Sequence: Synthetic oligonucleotide
  misc_feature 1..20: note = Description of Combined DNA/RNA Molecule: Synthetic oligonucleotide
  source 1..20: mol_type = other DNA
  modified_base 3: mod_base = OTHER; note = Uracil
  modified_base 5: mod_base = OTHER; note = Uracil
  modified_base 9: mod_base = OTHER; note = Uracil
  modified_base 11: mod_base = OTHER; note = Uracil
  modified_base 15: mod_base = OTHER; note = Uracil
  modified_base 17: mod_base = OTHER; note = Uracil
  misc_feature join(1,3,5,7,9,11,13,15,17,19): note = RNA residue
  misc_feature join(2,4,6,8,10,12,14,16,18,20): note = DNA residue
actgtacttcttggtctccc

SEQ ID NO: 411 - DNA, 20 bp, synthetic construct
  misc_feature 1..20: note = Description of Artificial Sequence: Synthetic oligonucleotide
  misc_feature 1..20: note = Description of Combined DNA/RNA Molecule: Synthetic oligonucleotide
  source 1..20: mol_type = other DNA
  modified_base 9: mod_base = OTHER; note = Uracil
  modified_base 13: mod_base = OTHER; note = Uracil
  misc_feature join(1,3,5,7,9,11,13,15,17,19): note = RNA residue
  misc_feature join(2,4,6,8,10,12,14,16,18,20): note = DNA residue
aactgtacttcttggtctcc

SEQ ID NO: 412 - DNA, 20 bp, synthetic construct
  misc_feature 1..20: note = Description of Artificial Sequence: Synthetic oligonucleotide
  misc_feature 1..20: note = Description of Combined DNA/RNA Molecule: Synthetic oligonucleotide
  source 1..20: mol_type = other DNA
  modified_base 5: mod_base = OTHER; note = Uracil
  modified_base 7: mod_base = OTHER; note = Uracil
  modified_base 11: mod_base = OTHER; note = Uracil
  modified_base 13: mod_base = OTHER; note = Uracil
  modified_base 17: mod_base = OTHER; note = Uracil
  modified_base 19: mod_base = OTHER; note = Uracil
  misc_feature join(1,3,5,7,9,11,13,15,17,19): note = RNA residue
  misc_feature join(2,4,6,8,10,12,14,16,18,20): note = DNA residue
caactgtacttcttggtctc

SEQ ID NO: 413 - DNA, 20 bp, synthetic construct
  misc_feature 1..20: note = Description of Artificial Sequence: Synthetic oligonucleotide
  misc_feature 1..20: note = Description of Combined DNA/RNA Molecule: Synthetic oligonucleotide
  source 1..20: mol_type = other DNA
  modified_base 11: mod_base = OTHER; note = Uracil
  modified_base 15: mod_base = OTHER; note = Uracil
  misc_feature join(1,3,5,7,9,11,13,15,17,19): note = RNA residue
  misc_feature join(2,4,6,8,10,12,14,16,18,20): note = DNA residue
ccaactgtacttcttggtct

SEQ ID NO: 414 - DNA, 20 bp, synthetic construct
  misc_feature 1..20: note = Description of Artificial Sequence: Synthetic oligonucleotide
  misc_feature 1..20: note = Description of Combined DNA/RNA Molecule: Synthetic oligonucleotide
  source 1..20: mol_type = other DNA
  modified_base 7: mod_base = OTHER; note = Uracil
  modified_base 9: mod_base = OTHER; note = Uracil
  modified_base 13: mod_base = OTHER; note = Uracil
  modified_base 15: mod_base = OTHER; note = Uracil
  modified_base 19: mod_base = OTHER; note = Uracil
  misc_feature join(1,3,5,7,9,11,13,15,17,19): note = RNA residue
  misc_feature join(2,4,6,8,10,12,14,16,18,20): note = DNA residue
cccaactgtacttcttggtc

SEQ ID NO: 415 - DNA, 20 bp, synthetic construct
  misc_feature 1..20: note = Description of Artificial Sequence: Synthetic oligonucleotide
  misc_feature 1..20: note = Description of Combined DNA/RNA Molecule: Synthetic oligonucleotide
  source 1..20: mol_type = other DNA
  modified_base 1: mod_base = OTHER; note = Uracil
  modified_base 13: mod_base = OTHER; note = Uracil
  modified_base 17: mod_base = OTHER; note = Uracil
  misc_feature join(1,3,5,7,9,11,13,15,17,19): note = RNA residue
  misc_feature join(2,4,6,8,10,12,14,16,18,20): note = DNA residue
tcccaactgtacttcttggt

SEQ ID NO: 416 - DNA, 20 bp, synthetic construct
  misc_feature 1..20: note = Description of Artificial Sequence: Synthetic oligonucleotide
  misc_feature 1..20: note = Description of Combined DNA/RNA Molecule: Synthetic oligonucleotide
  source 1..20: mol_type = other DNA
  modified_base 9: mod_base = OTHER; note = Uracil
  modified_base 11: mod_base = OTHER; note = Uracil
  modified_base 15: mod_base = OTHER; note = Uracil
  modified_base 17: mod_base = OTHER; note = Uracil
  misc_feature join(1,3,5,7,9,11,13,15,17,19): note = RNA residue
  misc_feature join(2,4,6,8,10,12,14,16,18,20): note = DNA residue
ctcccaactgtacttcttgg

SEQ ID NO: 417 - DNA, 20 bp, synthetic construct
  misc_feature 1..20: note = Description of Artificial Sequence: Synthetic oligonucleotide
  misc_feature 1..20: note = Description of Combined DNA/RNA Molecule: Synthetic oligonucleotide
  source 1..20: mol_type = other DNA
  modified_base 3: mod_base = OTHER; note = Uracil
  modified_base 15: mod_base = OTHER; note = Uracil
  modified_base 19: mod_base = OTHER; note = Uracil
  misc_feature join(1,3,5,7,9,11,13,15,17,19): note = RNA residue
  misc_feature join(2,4,6,8,10,12,14,16,18,20): note = DNA residue
gctcccaactgtacttcttg

SEQ ID NO: 418 - DNA, 20 bp, synthetic construct
  misc_feature 1..20: note = Description of Artificial Sequence: Synthetic oligonucleotide
  misc_feature 1..20: note = Description of Combined DNA/RNA Molecule: Synthetic oligonucleotide
  source 1..20: mol_type = other DNA
  modified_base 11: mod_base = OTHER; note = Uracil
  modified_base 13: mod_base = OTHER; note = Uracil
  modified_base 17: mod_base = OTHER; note = Uracil
  modified_base 19: mod_base = OTHER; note = Uracil
  misc_feature join(1,3,5,7,9,11,13,15,17,19): note = RNA residue
  misc_feature join(2,4,6,8,10,12,14,16,18,20): note = DNA residue
cgctcccaactgtacttctt

SEQ ID NO: 419 - DNA, 20 bp, synthetic construct
  misc_feature 1..20: note = Description of Artificial Sequence: Synthetic oligonucleotide
  misc_feature 1..20: note = Description of Combined DNA/RNA Molecule: Synthetic oligonucleotide
  source 1..20: mol_type = other DNA
  modified_base 1: mod_base = OTHER; note = Uracil
  modified_base 5: mod_base = OTHER; note = Uracil
  modified_base 17: mod_base = OTHER; note = Uracil
  misc_feature join(1,3,5,7,9,11,13,15,17,19): note = RNA residue
  misc_feature join(2,4,6,8,10,12,14,16,18,20): note = DNA residue
tcgctcccaactgtacttct

SEQ ID NO: 420 - DNA, 20 bp, synthetic construct
  misc_feature 1..20: note = Description of Artificial Sequence: Synthetic oligonucleotide
  misc_feature 1..20: note = Description of Combined DNA/RNA Molecule: Synthetic oligonucleotide
  source 1..20: mol_type = other DNA
  modified_base 13: mod_base = OTHER; note = Uracil
  modified_base 15: mod_base = OTHER; note = Uracil
  modified_base 19: mod_base = OTHER; note = Uracil
  misc_feature join(1,3,5,7,9,11,13,15,17,19): note = RNA residue
  misc_feature join(2,4,6,8,10,12,14,16,18,20): note = DNA residue
ctcgctcccaactgtacttc

SEQ ID NO: 421 - DNA, 20 bp, synthetic construct
  misc_feature 1..20: note = Description of Artificial Sequence: Synthetic oligonucleotide
  misc_feature 1..20: note = Description of Combined DNA/RNA Molecule: Synthetic oligonucleotide
  source 1..20: mol_type = other DNA
  modified_base 3: mod_base = OTHER; note = Uracil
  modified_base 7: mod_base = OTHER; note = Uracil
  modified_base 19: mod_base = OTHER; note = Uracil
  misc_feature join(1,3,5,7,9,11,13,15,17,19): note = RNA residue
  misc_feature join(2,4,6,8,10,12,14,16,18,20): note = DNA residue
cctcgctcccaactgtactt

SEQ ID NO: 422 - DNA, 20 bp, synthetic construct
  misc_feature 1..20: note = Description of Artificial Sequence: Synthetic oligonucleotide
  misc_feature 1..20: note = Description of Combined DNA/RNA Molecule: Synthetic oligonucleotide
  source 1..20: mol_type = other DNA
  modified_base 15: mod_base = OTHER; note = Uracil
  modified_base 17: mod_base = OTHER; note = Uracil
  misc_feature join(1,3,5,7,9,11,13,15,17,19): note = RNA residue
  misc_feature join(2,4,6,8,10,12,14,16,18,20): note = DNA residue
ccctcgctcccaactgtact

SEQ ID NO: 423 - DNA, 20 bp, synthetic construct
  misc_feature 1..20: note = Description of Artificial Sequence: Synthetic oligonucleotide
  misc_feature 1..20: note = Description of Combined DNA/RNA Molecule: Synthetic oligonucleotide
  source 1..20: mol_type = other DNA
  modified_base 1: mod_base = OTHER; note = Uracil
  modified_base 5: mod_base = OTHER; note = Uracil
  modified_base 9: mod_base = OTHER; note = Uracil
  misc_feature join(1,3,5,7,9,11,13,15,17,19): note = RNA residue
  misc_feature join(2,4,6,8,10,12,14,16,18,20): note = DNA residue
tccctcgctcccaactgtac

SEQ ID NO: 424 - DNA, 20 bp, synthetic construct
  misc_feature 1..20: note = Description of Artificial Sequence: Synthetic oligonucleotide
  misc_feature 1..20: note = Description of Combined DNA/RNA Molecule: Synthetic oligonucleotide
  source 1..20: mol_type = other DNA
  modified_base 17: mod_base = OTHER; note = Uracil
  modified_base 19: mod_base = OTHER; note = Uracil
  misc_feature join(1,3,5,7,9,11,13,15,17,19): note = RNA residue
  misc_feature join(2,4,6,8,10,12,14,16,18,20): note = DNA residue
ctccctcgctcccaactgta

SEQ ID NO: 425 - DNA, 20 bp, synthetic construct
  misc_feature 1..20: note = Description of Artificial Sequence: Synthetic oligonucleotide
  misc_feature 1..20: note = Description of Combined DNA/RNA Molecule: Synthetic oligonucleotide
  source 1..20: mol_type = other DNA
  modified_base 3: mod_base = OTHER; note = Uracil
  modified_base 7: mod_base = OTHER; note = Uracil
  modified_base 11: mod_base = OTHER; note = Uracil
  misc_feature join(1,3,5,7,9,11,13,15,17,19): note = RNA residue
  misc_feature join(2,4,6,8,10,12,14,16,18,20): note = DNA residue
gctccctcgctcccaactgt

SEQ ID NO: 426 - DNA, 20 bp, synthetic construct
  misc_feature 1..20: note = Description of Artificial Sequence: Synthetic oligonucleotide
  misc_feature 1..20: note = Description of Combined DNA/RNA Molecule: Synthetic oligonucleotide
  source 1..20: mol_type = other DNA
  modified_base 19: mod_base = OTHER; note = Uracil
  misc_feature join(1,3,5,7,9,11,13,15,17,19): note = RNA residue
  misc_feature join(2,4,6,8,10,12,14,16,18,20): note = DNA residue
agctccctcgctcccaactg

SEQ ID NO: 427 - DNA, 20 bp, synthetic construct
  misc_feature 1..20: note = Description of Artificial Sequence: Synthetic oligonucleotide
  misc_feature 1..20: note = Description of Combined DNA/RNA Molecule: Synthetic oligonucleotide
  source 1..20: mol_type = other DNA
  modified_base 5: mod_base = OTHER; note = Uracil
  modified_base 9: mod_base = OTHER; note = Uracil
  modified_base 13: mod_base = OTHER; note = Uracil
  misc_feature join(1,3,5,7,9,11,13,15,17,19): note = RNA residue
  misc_feature join(2,4,6,8,10,12,14,16,18,20): note = DNA residue
aagctccctcgctcccaact

SEQ ID NO: 428 - DNA, 20 bp, synthetic construct
  misc_feature 1..20: note = Description of Artificial Sequence: Synthetic oligonucleotide
  source 1..20: mol_type = other DNA
  misc_feature join(1,3,5,7,9,11,13,15,17,19): note = RNA residue
  misc_feature join(2,4,6,8,10,12,14,16,18,20): note = DNA residue
gaagctccctcgctcccaac

SEQ ID NO: 429 - DNA, 20 bp, synthetic construct
  misc_feature 1..20: note = Description of Artificial Sequence: Synthetic oligonucleotide
  misc_feature 1..20: note = Description of Combined DNA/RNA Molecule: Synthetic oligonucleotide
  source 1..20: mol_type = other DNA
  modified_base 1: mod_base = OTHER; note = Uracil
  modified_base 7: mod_base = OTHER; note = Uracil
  modified_base 11: mod_base = OTHER; note = Uracil
  modified_base 15: mod_base = OTHER; note = Uracil
  misc_feature join(1,3,5,7,9,11,13,15,17,19): note = RNA residue
  misc_feature join(2,4,6,8,10,12,14,16,18,20): note = DNA residue
tgaagctccctcgctcccaa

SEQ ID NO: 430 - DNA, 20 bp, synthetic construct
  misc_feature 1..20: note = Description of Artificial Sequence: Synthetic oligonucleotide
  source 1..20: mol_type = other DNA
  misc_feature join(1,3,5,7,9,11,13,15,17,19): note = RNA residue
  misc_feature join(2,4,6,8,10,12,14,16,18,20): note = DNA residue
gtgaagctccctcgctccca

SEQ ID NO: 431 - DNA, 20 bp, synthetic construct
  misc_feature 1..20: note = Description of Artificial Sequence: Synthetic oligonucleotide
  source 1..20: mol_type = other DNA
  misc_feature join(1,3,5,7,9,11,13,15,17,19): note = RNA residue
  misc_feature join(2,4,6,8,10,12,14,16,18,20): note = DNA residue
aagaaacaaccaccgccccg

SEQ ID NO: 432 - DNA, 20 bp, synthetic construct
  misc_feature 1..20: note = Description of Artificial Sequence: Synthetic oligonucleotide
  source 1..20: mol_type = other DNA
  misc_feature join(1,3,5,7,9,11,13,15,17,19): note = RNA residue
  misc_feature join(2,4,6,8,10,12,14,16,18,20): note = DNA residue
aaagaaacaaccaccgcccc

SEQ ID NO: 433 - DNA, 20 bp, synthetic construct
  misc_feature 1..20: note = Description of Artificial Sequence: Synthetic oligonucleotide
  source 1..20: mol_type = other DNA
  misc_feature join(1,3,5,7,9,11,13,15,17,19): note = RNA residue
  misc_feature join(2,4,6,8,10,12,14,16,18,20): note = DNA residue
aaaagaaacaaccaccgccc

SEQ ID NO: 434 - DNA, 20 bp, synthetic construct
  misc_feature 1..20: note = Description of Artificial Sequence: Synthetic oligonucleotide
  source 1..20: mol_type = other DNA
  misc_feature join(1,3,5,7,9,11,13,15,17,19): note = RNA residue
  misc_feature join(2,4,6,8,10,12,14,16,18,20): note = DNA residue
aaaaagaaacaaccaccgcc

SEQ ID NO: 435 - DNA, 20 bp, synthetic construct
  misc_feature 1..20: note = Description of Artificial Sequence: Synthetic oligonucleotide
  misc_feature 1..20: note = Description of Combined DNA/RNA Molecule: Synthetic oligonucleotide
  source 1..20: mol_type = other DNA
  modified_base 5: mod_base = OTHER; note = Uracil
  modified_base 13: mod_base = OTHER; note = Uracil
  misc_feature join(1,3,5,7,9,11,13,15,17,19): note = RNA residue
  misc_feature join(2,4,6,8,10,12,14,16,18,20): note = DNA residue
cccctcaggaattagaaaaa

SEQ ID NO: 436 - DNA, 20 bp, synthetic construct
  misc_feature 1..20: note = Description of Artificial Sequence: Synthetic oligonucleotide
  misc_feature 1..20: note = Description of Combined DNA/RNA Molecule: Synthetic oligonucleotide
  source 1..20: mol_type = other DNA
  modified_base 13: mod_base = OTHER; note = Uracil
  misc_feature join(1,3,5,7,9,11,13,15,17,19): note = RNA residue
  misc_feature join(2,4,6,8,10,12,14,16,18,20): note = DNA residue
acccctcaggaattagaaaa

SEQ ID NO: 437 - DNA, 20 bp, synthetic construct
  misc_feature 1..20: note = Description of Artificial Sequence: Synthetic oligonucleotide
  misc_feature 1..20: note = Description of Combined DNA/RNA Molecule: Synthetic oligonucleotide
  source 1..20: mol_type = other DNA
  modified_base 7: mod_base = OTHER; note = Uracil
  modified_base 15: mod_base = OTHER; note = Uracil
  misc_feature join(1,3,5,7,9,11,13,15,17,19): note = RNA residue
  misc_feature join(2,4,6,8,10,12,14,16,18,20): note = DNA residue
cacccctcaggaattagaaa

SEQ ID NO: 438 - DNA, 20 bp, synthetic construct
  misc_feature 1..20: note = Description of Artificial Sequence: Synthetic oligonucleotide
  misc_feature 1..20: note = Description of Combined DNA/RNA Molecule: Synthetic oligonucleotide
  source 1..20: mol_type = other DNA
  modified_base 15: mod_base = OTHER; note = Uracil
  misc_feature join(1,3,5,7,9,11,13,15,17,19): note = RNA residue
  misc_feature join(2,4,6,8,10,12,14,16,18,20): note = DNA residue
ccacccctcaggaattagaa

SEQ ID NO: 439 - DNA, 20 bp, synthetic construct
  misc_feature 1..20: note = Description of Artificial Sequence: Synthetic oligonucleotide
  misc_feature 1..20: note = Description of Combined DNA/RNA Molecule: Synthetic oligonucleotide
  source 1..20: mol_type = other DNA
  modified_base 9: mod_base = OTHER; note = Uracil
  modified_base 17: mod_base = OTHER; note = Uracil
  misc_feature join(1,3,5,7,9,11,13,15,17,19): note = RNA residue
  misc_feature join(2,4,6,8,10,12,14,16,18,20): note = DNA residue
accacccctcaggaattaga

SEQ ID NO: 440 - DNA, 20 bp, synthetic construct
  misc_feature 1..20: note = Description of Artificial Sequence: Synthetic oligonucleotide
  misc_feature 1..20: note = Description of Combined DNA/RNA Molecule: Synthetic oligonucleotide
  source 1..20: mol_type = other DNA
  modified_base 17: mod_base = OTHER; note = Uracil
  misc_feature join(1,3,5,7,9,11,13,15,17,19): note = RNA residue
  misc_feature join(2,4,6,8,10,12,14,16,18,20): note = DNA residue
aaccacccctcaggaattag

SEQ ID NO: 441 - DNA, 20 bp, synthetic construct
  misc_feature 1..20: note = Description of Artificial Sequence: Synthetic oligonucleotide
  misc_feature 1..20: note = Description of Combined DNA/RNA Molecule: Synthetic oligonucleotide
  source 1..20: mol_type = other DNA
  modified_base 11: mod_base = OTHER; note = Uracil
  modified_base 19: mod_base = OTHER; note = Uracil
  misc_feature join(1,3,5,7,9,11,13,15,17,19): note = RNA residue
  misc_feature join(2,4,6,8,10,12,14,16,18,20): note = DNA residue
caaccacccctcaggaatta

SEQ ID NO: 442 - DNA, 20 bp, synthetic construct
  misc_feature 1..20: note = Description of Artificial Sequence: Synthetic oligonucleotide
  misc_feature 1..20: note = Description of Combined DNA/RNA Molecule: Synthetic oligonucleotide
  source 1..20: mol_type = other DNA
  modified_base 19: mod_base = OTHER; note = Uracil
  misc_feature join(1,3,5,7,9,11,13,15,17,19): note = RNA residue
  misc_feature join(2,4,6,8,10,12,14,16,18,20): note = DNA residue
gcaaccacccctcaggaatt

SEQ ID NO: 443 - DNA, 20 bp, synthetic construct
  misc_feature 1..20: note = Description of Artificial Sequence: Synthetic oligonucleotide
  misc_feature 1..20: note = Description of Combined DNA/RNA Molecule: Synthetic oligonucleotide
  source 1..20: mol_type = other DNA
  modified_base 13: mod_base = OTHER; note = Uracil
  misc_feature join(1,3,5,7,9,11,13,15,17,19): note = RNA residue
  misc_feature join(2,4,6,8,10,12,14,16,18,20): note = DNA residue
agcaaccacccctcaggaat

SEQ ID NO: 444 - DNA, 20 bp, synthetic construct
  misc_feature 1..20: note = Description of Artificial Sequence: Synthetic oligonucleotide
  source 1..20: mol_type = other DNA
  misc_feature join(1,3,5,7,9,11,13,15,17,19): note = RNA residue
  misc_feature join(2,4,6,8,10,12,14,16,18,20): note = DNA residue
cagcaaccacccctcaggaa

SEQ ID NO: 445 - DNA, 20 bp, synthetic construct
  misc_feature 1..20: note = Description of Artificial Sequence: Synthetic oligonucleotide
  misc_feature 1..20: note = Description of Combined DNA/RNA Molecule: Synthetic oligonucleotide
  source 1..20: mol_type = other DNA
  modified_base 15: mod_base = OTHER; note = Uracil
  misc_feature join(1,3,5,7,9,11,13,15,17,19): note = RNA residue
  misc_feature join(2,4,6,8,10,12,14,16,18,20): note = DNA residue
gcagcaaccacccctcagga

SEQ ID NO: 446 - DNA, 20 bp, synthetic construct
  misc_feature 1..20: note = Description of Artificial Sequence: Synthetic oligonucleotide
  misc_feature 1..20: note = Description of Combined DNA/RNA Molecule: Synthetic oligonucleotide
  source 1..20: mol_type = other DNA
  modified_base 17: mod_base = OTHER; note = Uracil
  misc_feature join(1,3,5,7,9,11,13,15,17,19): note = RNA residue
  misc_feature join(2,4,6,8,10,12,14,16,18,20): note = DNA residue
aagcagcaaccacccctcag

SEQ ID NO: 447 - DNA, 20 bp, synthetic construct
  misc_feature 1..20: note = Description of Artificial Sequence: Synthetic oligonucleotide
  source 1..20: mol_type = other DNA
  misc_feature join(1,3,5,7,9,11,13,15,17,19): note = RNA residue
  misc_feature join(2,4,6,8,10,12,14,16,18,20): note = DNA residue
aaagcagcaaccacccctca

SEQ ID NO: 448 - DNA, 20 bp, synthetic construct
  misc_feature 1..20: note = Description of Artificial Sequence: Synthetic oligonucleotide
  misc_feature 1..20: note = Description of Combined DNA/RNA Molecule: Synthetic oligonucleotide
  source 1..20: mol_type = other DNA
  modified_base 19: mod_base = OTHER; note = Uracil
  misc_feature join(1,3,5,7,9,11,13,15,17,19): note = RNA residue
  misc_feature join(2,4,6,8,10,12,14,16,18,20): note = DNA residue
aaaagcagcaaccacccctc

SEQ ID NO: 449 - DNA, 20 bp, synthetic construct
  misc_feature 1..20: note = Description of Artificial Sequence: Synthetic oligonucleotide
  source 1..20: mol_type = other DNA
  misc_feature join(1,3,5,7,9,11,13,15,17,19): note = RNA residue
  misc_feature join(2,4,6,8,10,12,14,16,18,20): note = DNA residue
caaaagcagcaaccacccct

SEQ ID NO: 450 - DNA, 20 bp, synthetic construct
  misc_feature 1..20: note = Description of Artificial Sequence: Synthetic oligonucleotide
  source 1..20: mol_type = other DNA
  misc_feature join(1,3,5,7,9,11,13,15,17,19): note = RNA residue
  misc_feature join(2,4,6,8,10,12,14,16,18,20): note = DNA residue
gcaaaagcagcaaccacccc

SEQ ID NO: 451 - DNA, 20 bp, synthetic construct
  misc_feature 1..20: note = Description of Artificial Sequence: Synthetic oligonucleotide
  source 1..20: mol_type = other DNA
  misc_feature join(1,3,5,7,9,11,13,15,17,19): note = RNA residue
  misc_feature join(2,4,6,8,10,12,14,16,18,20): note = DNA residue
agcaaaagcagcaaccaccc

SEQ ID NO: 452 - DNA, 20 bp, synthetic construct
  misc_feature 1..20: note = Description of Artificial Sequence: Synthetic oligonucleotide
  misc_feature 1..20: note = Description of Combined DNA/RNA Molecule: Synthetic oligonucleotide
  source 1..20: mol_type = other DNA
  modified_base 1: mod_base = OTHER; note = Uracil
  misc_feature join(1,3,5,7,9,11,13,15,17,19): note = RNA residue
  misc_feature join(2,4,6,8,10,12,14,16,18,20): note = DNA residue
tagcaaaagcagcaaccacc

SEQ ID NO: 453 - DNA, 20 bp, synthetic construct
  misc_feature 1..20: note = Description of Artificial Sequence: Synthetic oligonucleotide
  source 1..20: mol_type = other DNA
  misc_feature join(1,3,5,7,9,11,13,15,17,19): note = RNA residue
  misc_feature join(2,4,6,8,10,12,14,16,18,20): note = DNA residue
gtagcaaaagcagcaaccac

SEQ ID NO: 454 - DNA, 20 bp, synthetic construct
  misc_feature 1..20: note = Description of Artificial Sequence: Synthetic oligonucleotide
  misc_feature 1..20: note = Description of Combined DNA/RNA Molecule: Synthetic oligonucleotide
  source 1..20: mol_type = other DNA
  modified_base 1: mod_base = OTHER; note = Uracil
  modified_base 3: mod_base = OTHER; note = Uracil
  misc_feature join(1,3,5,7,9,11,13,15,17,19): note = RNA residue
  misc_feature join(2,4,6,8,10,12,14,16,18,20): note = DNA residue
tgtagcaaaagcagcaacca

SEQ ID NO: 455 - DNA, 20 bp, synthetic construct
  misc_feature 1..20: note = Description of Artificial Sequence: Synthetic oligonucleotide
  source 1..20: mol_type = other DNA
  misc_feature join(1,3,5,7,9,11,13,15,17,19): note = RNA residue
  misc_feature join(2,4,6,8,10,12,14,16,18,20): note = DNA residue
atgtagcaaaagcagcaacc

SEQ ID NO: 456 - DNA, 20 bp, synthetic construct
  misc_feature 1..20: note = Description of Artificial Sequence: Synthetic oligonucleotide
  misc_feature 1..20: note = Description of Combined DNA/RNA Molecule: Synthetic oligonucleotide
  source 1..20: mol_type = other DNA
  modified_base 3: mod_base = OTHER; note = Uracil
  modified_base 5: mod_base = OTHER; note = Uracil
  misc_feature join(1,3,5,7,9,11,13,15,17,19): note = RNA residue
  misc_feature join(2,4,6,8,10,12,14,16,18,20): note = DNA residue
catgtagcaaaagcagcaac

SEQ ID NO: 457 - DNA, 20 bp, synthetic construct
  misc_feature 1..20: note = Description of Artificial Sequence: Synthetic oligonucleotide
  misc_feature 1..20: note = Description of Combined DNA/RNA Molecule: Synthetic oligonucleotide
  source 1..20: mol_type = other DNA
  modified_base 1: mod_base = OTHER; note = Uracil
  misc_feature join(1,3,5,7,9,11,13,15,17,19): note = RNA residue
  misc_feature join(2,4,6,8,10,12,14,16,18,20): note = DNA residue
tcatgtagcaaaagcagcaa

SEQ ID NO: 458 - DNA, 20 bp, synthetic construct
  misc_feature 1..20: note = Description of Artificial Sequence: Synthetic oligonucleotide
  misc_feature 1..20: note = Description of Combined DNA/RNA Molecule: Synthetic oligonucleotide
  source 1..20: mol_type = other DNA
  modified_base 5: mod_base = OTHER; note = Uracil
  modified_base 7: mod_base = OTHER; note = Uracil
  misc_feature join(1,3,5,7,9,11,13,15,17,19): note = RNA residue
  misc_feature join(2,4,6,8,10,12,14,16,18,20): note = DNA residue
gtcatgtagcaaaagcagca

SEQ ID NO: 459 - DNA, 20 bp, synthetic construct
  misc_feature 1..20: note = Description of Artificial Sequence: Synthetic oligonucleotide
  misc_feature 1..20: note = Description of Combined DNA/RNA Molecule: Synthetic oligonucleotide
  source 1..20: mol_type = other DNA
  modified_base 3: mod_base = OTHER; note = Uracil
  misc_feature join(1,3,5,7,9,11,13,15,17,19): note = RNA residue
  misc_feature join(2,4,6,8,10,12,14,16,18,20): note = DNA residue
agtcatgtagcaaaagcagc

SEQ ID NO: 460 - DNA, 20 bp, synthetic construct
  misc_feature 1..20: note = Description of Artificial Sequence: Synthetic oligonucleotide
  misc_feature 1..20: note = Description of Combined DNA/RNA Molecule: Synthetic oligonucleotide
  source 1..20: mol_type = other DNA
  modified_base 7: mod_base = OTHER; note = Uracil
  modified_base 9: mod_base = OTHER; note = Uracil
  misc_feature join(1,3,5,7,9,11,13,15,17,19): note = RNA residue
  misc_feature join(2,4,6,8,10,12,14,16,18,20): note = DNA residue
aagtcatgtagcaaaagcag

SEQ ID NO: 461 - DNA, 20 bp, synthetic construct
  misc_feature 1..20: note = Description of Artificial Sequence: Synthetic oligonucleotide
  misc_feature 1..20: note = Description of Combined DNA/RNA Molecule: Synthetic oligonucleotide
  source 1..20: mol_type = other DNA
  modified_base 5: mod_base = OTHER; note = Uracil
  misc_feature join(1,3,5,7,9,11,13,15,17,19): note = RNA residue
  misc_feature join(2,4,6,8,10,12,14,16,18,20): note = DNA residue
caagtcatgtagcaaaagca

SEQ ID NO: 462 - DNA, 20 bp, synthetic construct
  misc_feature 1..20: note = Description of Artificial Sequence: Synthetic oligonucleotide
  misc_feature 1..20: note = Description of Combined DNA/RNA Molecule: Synthetic oligonucleotide
  source 1..20: mol_type = other DNA
  modified_base 9: mod_base = OTHER; note = Uracil
  modified_base 11: mod_base = OTHER; note = Uracil
  misc_feature join(1,3,5,7,9,11,13,15,17,19): note = RNA residue
  misc_feature join(2,4,6,8,10,12,14,16,18,20): note = DNA residue
gcaagtcatgtagcaaaagc

SEQ ID NO: 463 - DNA, 20 bp, synthetic construct
  misc_feature 1..20: note = Description of Artificial Sequence: Synthetic oligonucleotide
  misc_feature 1..20: note = Description of Combined DNA/RNA Molecule: Synthetic oligonucleotide
  source 1..20: mol_type = other DNA
  modified_base 7: mod_base = OTHER; note = Uracil
  misc_feature join(1,3,5,7,9,11,13,15,17,19): note = RNA residue
  misc_feature join(2,4,6,8,10,12,14,16,18,20): note = DNA residue
ggcaagtcatgtagcaaaag

SEQ ID NO: 464 - DNA, 20 bp, synthetic construct
  misc_feature 1..20: note = Description of Artificial Sequence: Synthetic oligonucleotide
  misc_feature 1..20: note = Description of Combined DNA/RNA Molecule: Synthetic oligonucleotide
  source 1..20: mol_type = other DNA
  modified_base 1: mod_base = OTHER; note = Uracil
  modified_base 11: mod_base = OTHER; note = Uracil
  modified_base 13: mod_base = OTHER; note = Uracil
  misc_feature join(1,3,5,7,9,11,13,15,17,19): note = RNA residue
  misc_feature join(2,4,6,8,10,12,14,16,18,20): note = DNA residue
tggcaagtcatgtagcaaaa

SEQ ID NO: 465 - DNA, 20 bp, synthetic construct
  misc_feature 1..20: note = Description of Artificial Sequence: Synthetic oligonucleotide
  misc_feature 1..20: note = Description of Combined DNA/RNA Molecule: Synthetic oligonucleotide
  source 1..20: mol_type = other DNA
  modified_base 9: mod_base = OTHER; note = Uracil
  misc_feature join(1,3,5,7,9,11,13,15,17,19): note = RNA residue
  misc_feature join(2,4,6,8,10,12,14,16,18,20): note = DNA residue
ctggcaagtcatgtagcaaa

SEQ ID NO: 466 - DNA, 20 bp, synthetic construct
  misc_feature 1..20: note = Description of Artificial Sequence: Synthetic oligonucleotide
  misc_feature 1..20: note = Description of Combined DNA/RNA Molecule: Synthetic oligonucleotide
  source 1..20: mol_type = other DNA
  modified_base 3: mod_base = OTHER; note = Uracil
  modified_base 13: mod_base = OTHER; note = Uracil
  modified_base 15: mod_base = OTHER; note = Uracil
  misc_feature join(1,3,5,7,9,11,13,15,17,19): note = RNA residue
  misc_feature join(2,4,6,8,10,12,14,16,18,20): note = DNA residue
gctggcaagtcatgtagcaa

SEQ ID NO: 467 - DNA, 20 bp, synthetic construct
  misc_feature 1..20: note = Description of Artificial Sequence: Synthetic oligonucleotide
  misc_feature 1..20: note = Description of Combined DNA/RNA Molecule: Synthetic oligonucleotide
  source 1..20: mol_type = other DNA
  modified_base 11: mod_base = OTHER; note = Uracil
  misc_feature join(1,3,5,7,9,11,13,15,17,19): note = RNA residue
  misc_feature join(2,4,6,8,10,12,14,16,18,20): note = DNA residue
cgctggcaagtcatgtagca

SEQ ID NO: 468 - DNA, 20 bp, synthetic construct
  misc_feature 1..20: note = Description of Artificial Sequence: Synthetic oligonucleotide
  misc_feature 1..20: note = Description of Combined DNA/RNA Molecule: Synthetic oligonucleotide
  source 1..20: mol_type = other DNA
  modified_base 5: mod_base = OTHER; note = Uracil
  modified_base 15: mod_base = OTHER; note = Uracil
  modified_base 17: mod_base = OTHER; note = Uracil
  misc_feature join(1,3,5,7,9,11,13,15,17,19): note = RNA residue
  misc_feature join(2,4,6,8,10,12,14,16,18,20): note = DNA residue
gcgctggcaagtcatgtagc

SEQ ID NO: 469 - DNA, 20 bp, synthetic construct
  misc_feature 1..20: note = Description of Artificial Sequence: Synthetic oligonucleotide
  misc_feature 1..20: note = Description of Combined DNA/RNA Molecule: Synthetic oligonucleotide
  source 1..20: mol_type = other DNA
  modified_base 1: mod_base = OTHER; note = Uracil
  modified_base 5: mod_base = OTHER; note = Uracil
  modified_base 11: mod_base = OTHER; note = Uracil
  modified_base 13: mod_base = OTHER; note = Uracil
  misc_feature join(1,3,5,7,9,11,13,15,17,19): note = RNA residue
  misc_feature join(2,4,6,8,10,12,14,16,18,20): note = DNA residue
tcacttacagtctggtccca

SEQ ID NO: 470 - DNA, 20 bp, synthetic construct
  misc_feature 1..20: note = Description of Artificial Sequence: Synthetic oligonucleotide
  misc_feature 1..20: note = Description of Combined DNA/RNA Molecule: Synthetic oligonucleotide
  source 1..20: mol_type = other DNA
  modified_base 1: mod_base = OTHER; note = Uracil
  modified_base 7: mod_base = OTHER; note = Uracil
  modified_base 17: mod_base = OTHER; note = Uracil
  misc_feature join(1,3,5,7,9,11,13,15,17,19): note = RNA residue
  misc_feature join(2,4,6,8,10,12,14,16,18,20): note = DNA residue
ttcacttacagtctggtccc

SEQ ID NO: 471 - DNA, 20 bp, synthetic construct
  misc_feature 1..20: note = Description of Artificial Sequence: Synthetic oligonucleotide
  misc_feature 1..20: note = Description of Combined DNA/RNA Molecule: Synthetic oligonucleotide
  source 1..20: mol_type = other DNA
  modified_base 5: mod_base = OTHER; note = Uracil
  modified_base 9: mod_base = OTHER; note = Uracil
  modified_base 15: mod_base = OTHER; note = Uracil
  modified_base 17: mod_base = OTHER; note = Uracil
  misc_feature join(1,3,5,7,9,11,13,15,17,19): note = RNA residue
  misc_feature join(2,4,6,8,10,12,14,16,18,20): note = DNA residue
acgttcacttacagtctggt

SEQ ID NO: 472 - DNA, 20 bp, synthetic construct
  misc_feature 1..20: note = Description of Artificial Sequence: Synthetic oligonucleotide
  misc_feature 1..20: note = Description of Combined DNA/RNA Molecule: Synthetic oligonucleotide
  source 1..20: mol_type = other DNA
  modified_base 11: mod_base = OTHER; note = Uracil
  modified_base 17: mod_base = OTHER; note = Uracil
  misc_feature join(1,3,5,7,9,11,13,15,17,19): note = RNA residue
  misc_feature join(2,4,6,8,10,12,14,16,18,20): note = DNA residue
gtgtaaaacgttcacttaca

SEQ ID NO: 473 - DNA, 20 bp, synthetic construct
  misc_feature 1..20: note = Description of Artificial Sequence: Synthetic oligonucleotide
  misc_feature 1..20: note = Description of Combined DNA/RNA Molecule: Synthetic oligonucleotide
  source 1..20: mol_type = other DNA
  modified_base 1: mod_base = OTHER; note = Uracil
  modified_base 3: mod_base = OTHER; note = Uracil
  modified_base 5: mod_base = OTHER; note = Uracil
  modified_base 13: mod_base = OTHER; note = Uracil
  modified_base 17: mod_base = OTHER; note = Uracil
  misc_feature join(1,3,5,7,9,11,13,15,17,19): note = RNA residue
  misc_feature join(2,4,6,8,10,12,14,16,18,20): note = DNA residue
tgtgtaaaacgttcacttac

SEQ ID NO: 474 - DNA, 20 bp, synthetic construct
  misc_feature 1..20: note = Description of Artificial Sequence: Synthetic oligonucleotide
  misc_feature 1..20: note = Description of Combined DNA/RNA Molecule: Synthetic oligonucleotide
  source 1..20: mol_type = other DNA
  modified_base 13: mod_base = OTHER; note = Uracil
  modified_base 19: mod_base = OTHER; note = Uracil
  misc_feature join(1,3,5,7,9,11,13,15,17,19): note = RNA residue
  misc_feature join(2,4,6,8,10,12,14,16,18,20): note = DNA residue
gtgtgtaaaacgttcactta

SEQ ID NO: 475 - DNA, 20 bp, synthetic construct
  misc_feature 1..20: note = Description of Artificial Sequence: Synthetic oligonucleotide
  misc_feature 1..20: note = Description of Combined DNA/RNA Molecule: Synthetic oligonucleotide
  source 1..20: mol_type = other DNA
  modified_base 1: mod_base = OTHER; note = Uracil
  modified_base 3: mod_base = OTHER; note = Uracil
  modified_base 5: mod_base = OTHER; note = Uracil
  modified_base 7: mod_base = OTHER; note = Uracil
  modified_base 15: mod_base = OTHER; note = Uracil
  modified_base 19: mod_base = OTHER; note = Uracil
  misc_feature join(1,3,5,7,9,11,13,15,17,19): note = RNA residue
  misc_feature join(2,4,6,8,10,12,14,16,18,20): note = DNA residue
tgtgtgtaaaacgttcactt

SEQ ID NO: 476 - DNA, 20 bp, synthetic construct
  misc_feature 1..20: note = Description of Artificial Sequence: Synthetic oligonucleotide
  misc_feature 1..20: note = Description of Combined DNA/RNA Molecule: Synthetic oligonucleotide
  source 1..20: mol_type = other DNA
  modified_base 1: mod_base = OTHER; note = Uracil
  modified_base 7: mod_base = OTHER; note = Uracil
  modified_base 9: mod_base = OTHER; note = Uracil
  modified_base 11: mod_base = OTHER; note = Uracil
  modified_base 13: mod_base = OTHER; note = Uracil
  misc_feature join(1,3,5,7,9,11,13,15,17,19): note = RNA residue
  misc_feature join(2,4,6,8,10,12,14,16,18,20): note = DNA residue
tgcaaatgtgtgtaaaacgt

SEQ ID NO: 477 - DNA, 20 bp, synthetic construct
  misc_feature 1..20: note = Description of Artificial Sequence: Synthetic oligonucleotide
  source 1..20: mol_type = other DNA
  misc_feature join(1,3,5,7,9,11,13,15,17,19): note = RNA residue
  misc_feature join(2,4,6,8,10,12,14,16,18,20): note = DNA residue
atgcaaatgtgtgtaaaacg

SEQ ID NO: 478 - DNA, 20 bp, synthetic construct
  misc_feature 1..20: note = Description of Artificial Sequence: Synthetic oligonucleotide
  misc_feature 1..20: note = Description of Combined DNA/RNA Molecule: Synthetic oligonucleotide
  source 1..20: mol_type = other DNA
  modified_base 3: mod_base = OTHER; note = Uracil
  modified_base 9: mod_base = OTHER; note = Uracil
  modified_base 11: mod_base = OTHER; note = Uracil
  modified_base 13: mod_base = OTHER; note = Uracil
  modified_base 15: mod_base = OTHER; note = Uracil
  misc_feature join(1,3,5,7,9,11,13,15,17,19): note = RNA residue
  misc_feature join(2,4,6,8,10,12,14,16,18,20): note = DNA residue
aatgcaaatgtgtgtaaaac

SEQ ID NO: 479 - DNA, 20 bp, synthetic construct
  misc_feature 1..20: note = Description of Artificial Sequence: Synthetic oligonucleotide
  source 1..20: mol_type = other DNA
  misc_feature join(1,3,5,7,9,11,13,15,17,19): note = RNA residue
  misc_feature join(2,4,6,8,10,12,14,16,18,20): note = DNA residue
caatgcaaatgtgtgtaaaa

SEQ ID NO: 480 - DNA, 20 bp, synthetic construct
  misc_feature 1..20: note = Description of Artificial Sequence: Synthetic oligonucleotide
  misc_feature 1..20: note = Description of Combined DNA/RNA Molecule: Synthetic oligonucleotide
  source 1..20: mol_type = other DNA
  modified_base 1: mod_base = OTHER; note = Uracil
  modified_base 3: mod_base = OTHER; note = Uracil
  misc_feature join(1,3,5,7,9,11,13,15,17,19): note = RNA residue
  misc_feature join(2,4,6,8,10,12,14,16,18,20): note = DNA residue
tttacaatgcaaatgtgtgt

SEQ ID NO: 481 - DNA, 20 bp, synthetic construct
  misc_feature 1..20: note = Description of Artificial Sequence: Synthetic oligonucleotide
  misc_feature 1..20: note = Description of Combined DNA/RNA Molecule: Synthetic oligonucleotide
  source 1..20: mol_type = other DNA
  modified_base 13: mod_base = OTHER; note = Uracil
  modified_base 17: mod_base = OTHER; note = Uracil
  modified_base 19: mod_base = OTHER; note = Uracil
  misc_feature join(1,3,5,7,9,11,13,15,17,19): note = RNA residue
  misc_feature join(2,4,6,8,10,12,14,16,18,20): note = DNA residue
aaatacctggacttattttt

SEQ ID NO: 482 - DNA, 20 bp, synthetic construct
  misc_feature 1..20: note = Description of Artificial Sequence: Synthetic oligonucleotide
  misc_feature 1..20: note = Description of Combined DNA/RNA Molecule: Synthetic oligonucleotide
  source 1..20: mol_type = other DNA
  modified_base 5: mod_base = OTHER; note = Uracil
  modified_base 9: mod_base = OTHER; note = Uracil
  modified_base 15: mod_base = OTHER; note = Uracil
  modified_base 17: mod_base = OTHER; note = Uracil
  modified_base 19: mod_base = OTHER; note = Uracil
  misc_feature join(1,3,5,7,9,11,13,15,17,19): note = RNA residue
  misc_feature join(2,4,6,8,10,12,14,16,18,20): note = DNA residue
aaaatacctggacttatttt

SEQ ID NO: 483 - DNA, 20 bp, synthetic construct
  misc_feature 1..20: note = Description of Artificial Sequence: Synthetic oligonucleotide
  misc_feature 1..20: note = Description of Combined DNA/RNA Molecule: Synthetic oligonucleotide
  source 1..20: mol_type = other DNA
  modified_base 15: mod_base = OTHER; note = Uracil
  modified_base 19: mod_base = OTHER; note = Uracil
  misc_feature join(1,3,5,7,9,11,13,15,17,19): note = RNA residue
  misc_feature join(2,4,6,8,10,12,14,16,18,20): note = DNA residue
aaaaatacctggacttattt

SEQ ID NO: 484 - DNA, 20 bp, synthetic construct
  misc_feature 1..20: note = Description of Artificial Sequence: Synthetic oligonucleotide
  misc_feature 1..20: note = Description of Combined DNA/RNA Molecule: Synthetic oligonucleotide
  source 1..20: mol_type = other DNA
  modified_base 5: mod_base = OTHER; note = Uracil
  modified_base 13: mod_base = OTHER; note = Uracil
  misc_feature join(1,3,5,7,9,11,13,15,17,19): note = RNA residue
  misc_feature join(2,4,6,8,10,12,14,16,18,20): note = DNA residue
aacgtacagaaatgggaggg

SEQ ID NO: 485 - DNA, 20 bp, synthetic construct
  misc_feature 1..20: note = Description of Artificial Sequence: Synthetic oligonucleotide
  source 1..20: mol_type = other DNA
  misc_feature join(1,3,5,7,9,11,13,15,17,19): note = RNA residue
  misc_feature join(2,4,6,8,10,12,14,16,18,20): note = DNA residue
aaacgtacagaaatgggagg

SEQ ID NO: 486 - DNA, 20 bp, synthetic construct
  misc_feature 1..20: note = Description of Artificial Sequence: Synthetic oligonucleotide
  misc_feature 1..20: note = Description of Combined DNA/RNA Molecule: Synthetic oligonucleotide
  source 1..20: mol_type = other DNA
  modified_base 7: mod_base = OTHER; note = Uracil
  modified_base 15: mod_base = OTHER; note = Uracil
  misc_feature join(1,3,5,7,9,11,13,15,17,19): note = RNA residue
  misc_feature join(2,4,6,8,10,12,14,16,18,20): note = DNA residue
caaacgtacagaaatgggag

SEQ ID NO: 487 - DNA, 20 bp, synthetic construct
  misc_feature 1..20: note = Description of Artificial Sequence: Synthetic oligonucleotide
  source 1..20: mol_type = other DNA
  misc_feature join(1,3,5,7,9,11,13,15,17,19): note = RNA residue
  misc_feature join(2,4,6,8,10,12,14,16,18,20): note = DNA residue
acaaacgtacagaaatggga

SEQ ID NO: 488 - DNA, 20 bp, synthetic construct
  misc_feature 1..20: note = Description of Artificial Sequence: Synthetic oligonucleotide
  misc_feature 1..20: note = Description of Combined DNA/RNA Molecule: Synthetic oligonucleotide
  source 1..20: mol_type = other DNA
  modified_base 9: mod_base = OTHER; note = Uracil
  modified_base 17: mod_base = OTHER; note = Uracil
  misc_feature join(1,3,5,7,9,11,13,15,17,19): note = RNA residue
  misc_feature join(2,4,6,8,10,12,14,16,18,20): note = DNA residue
aacaaacgtacagaaatggg

SEQ ID NO: 489 - DNA, 20 bp, synthetic construct
  misc_feature 1..20: note = Description of Artificial Sequence: Synthetic oligonucleotide
  source 1..20: mol_type = other DNA
  misc_feature join(1,3,5,7,9,11,13,15,17,19): note = RNA residue
  misc_feature join(2,4,6,8,10,12,14,16,18,20): note = DNA residue
gaacaaacgtacagaaatgg

SEQ ID NO: 490 - DNA, 20 bp, synthetic construct
  misc_feature 1..20: note = Description of Artificial Sequence: Synthetic oligonucleotide
  misc_feature 1..20: note = Description of Combined DNA/RNA Molecule: Synthetic oligonucleotide
  source 1..20: mol_type = other DNA
  modified_base 13: mod_base = OTHER; note = Uracil
  modified_base 15: mod_base = OTHER; note = Uracil
  misc_feature join(1,3,5,7,9,11,13,15,17,19): note = RNA residue
  misc_feature join(2,4,6,8,10,12,14,16,18,20): note = DNA residue
cactccacaccttgttagaa

SEQ ID NO: 491 - DNA, 20 bp, synthetic construct
  misc_feature 1..20: note = Description of Artificial Sequence: Synthetic oligonucleotide
  misc_feature 1..20: note = Description of Combined DNA/RNA Molecule: Synthetic oligonucleotide
  source 1..20: mol_type = other DNA
  modified_base 5: mod_base = OTHER; note = Uracil
  modified_base 13: mod_base = OTHER; note = Uracil
  modified_base 17: mod_base = OTHER; note = Uracil
  misc_feature join(1,3,5,7,9,11,13,15,17,19): note = RNA residue
  misc_feature join(2,4,6,8,10,12,14,16,18,20): note = DNA residue
acactccacaccttgttaga

SEQ ID NO: 492 - DNA, 20 bp, synthetic construct
  misc_feature 1..20: note = Description of Artificial Sequence: Synthetic oligonucleotide
  misc_feature 1..20: note = Description of Combined DNA/RNA Molecule: Synthetic oligonucleotide
  source 1..20: mol_type = other DNA
  modified_base 15: mod_base = OTHER; note = Uracil
  modified_base 17: mod_base = OTHER; note = Uracil
  misc_feature join(1,3,5,7,9,11,13,15,17,19): note = RNA residue
  misc_feature join(2,4,6,8,10,12,14,16,18,20): note = DNA residue
gacactccacaccttgttag

SEQ ID NO: 493 - DNA, 20 bp, synthetic construct
  misc_feature 1..20: note = Description of Artificial Sequence: Synthetic oligonucleotide
  misc_feature 1..20: note = Description of Combined DNA/RNA Molecule: Synthetic oligonucleotide
  source 1..20: mol_type = other DNA
  modified_base 1: mod_base = OTHER; note = Uracil
  modified_base 5: mod_base = OTHER; note = Uracil
  modified_base 11: mod_base = OTHER; note = Uracil
  modified_base 19: mod_base = OTHER; note = Uracil
  misc_feature join(1,3,5,7,9,11,13,15,17,19): note = RNA residue
  misc_feature join(2,4,6,8,10,12,14,16,18,20): note = DNA residue
tcgctgacactccacacctt

SEQ ID NO: 494 - DNA, 20 bp, synthetic construct
  misc_feature 1..20: note = Description of Artificial Sequence: Synthetic oligonucleotide
  misc_feature 1..20: note = Description of Combined DNA/RNA Molecule: Synthetic oligonucleotide
  source 1..20: mol_type = other DNA
  modified_base 5: mod_base = OTHER; note = Uracil
  modified_base 7: mod_base = OTHER; note = Uracil
  modified_base 15: mod_base = OTHER; note = Uracil
  misc_feature join(1,3,5,7,9,11,13,15,17,19): note = RNA residue
  misc_feature join(2,4,6,8,10,12,14,16,18,20): note = DNA residue
gtattctccccacattgcac

SEQ ID NO: 495 - DNA, 20 bp, synthetic construct
  misc_feature 1..20: note = Description of Artificial Sequence: Synthetic oligonucleotide
  misc_feature 1..20: note = Description of Combined DNA/RNA Molecule: Synthetic oligonucleotide
  source 1..20: mol_type = other DNA
  modified_base 1: mod_base = OTHER; note = Uracil
  modified_base 3: mod_base = OTHER; note = Uracil
  modified_base 5: mod_base = OTHER; note = Uracil
  modified_base 17: mod_base = OTHER; note = Uracil
  misc_feature join(1,3,5,7,9,11,13,15,17,19): note = RNA residue
  misc_feature join(2,4,6,8,10,12,14,16,18,20): note = DNA residue
tgtattctccccacattgca

SEQ ID NO: 496 - DNA, 20 bp, synthetic construct
  misc_feature 1..20: note = Description of Artificial Sequence: Synthetic oligonucleotide
  misc_feature 1..20: note = Description of Combined DNA/RNA Molecule: Synthetic oligonucleotide
  source 1..20: mol_type = other DNA
  modified_base 7: mod_base = OTHER; note = Uracil
  modified_base 9: mod_base = OTHER; note = Uracil
  modified_base 17: mod_base = OTHER; note = Uracil
  misc_feature join(1,3,5,7,9,11,13,15,17,19): note = RNA residue
  misc_feature join(2,4,6,8,10,12,14,16,18,20): note = DNA residue
atgtattctccccacattgc

SEQ ID NO: 497 - DNA, 20 bp, synthetic construct
  misc_feature 1..20: note = Description of Artificial Sequence: Synthetic oligonucleotide
  misc_feature 1..20: note = Description of Combined DNA/RNA Molecule: Synthetic oligonucleotide
  source 1..20: mol_type = other DNA
  modified_base 5: mod_base = OTHER; note = Uracil
  modified_base 7: mod_base = OTHER; note = Uracil
  modified_base 9: mod_base = OTHER; note = Uracil
  misc_feature join(1,3,5,7,9,11,13,15,17,19): note = RNA residue
  misc_feature join(2,4,6,8,10,12,14,16,18,20): note = DNA residue
acaatgtattctccccacat

SEQ ID NO: 498 - DNA, 20 bp, synthetic construct
  misc_feature 1..20: note = Description of Artificial Sequence: Synthetic oligonucleotide
  misc_feature 1..20: note = Description of Combined DNA/RNA Molecule: Synthetic oligonucleotide
  source 1..20: mol_type = other DNA
  modified_base 1: mod_base = OTHER; note = Uracil
  modified_base 7: mod_base = OTHER; note = Uracil
  modified_base 15: mod_base = OTHER; note = Uracil
  misc_feature join(1,3,5,7,9,11,13,15,17,19): note = RNA residue
  misc_feature join(2,4,6,8,10,12,14,16,18,20): note = DNA residue
ttgacttccaaaccttatat

SEQ ID NO: 499 - DNA, 20 bp, synthetic construct
  misc_feature 1..20: note = Description of Artificial Sequence: Synthetic oligonucleotide
  misc_feature 1..20: note = Description of Combined DNA/RNA Molecule: Synthetic oligonucleotide
  source 1..20: mol_type = other DNA
  modified_base 1: mod_base = OTHER; note = Uracil
  modified_base 3: mod_base = OTHER; note = Uracil
  modified_base 7: mod_base = OTHER; note = Uracil
  modified_base 17: mod_base = OTHER; note = Uracil
  modified_base 19: mod_base = OTHER; note = Uracil
  misc_feature join(1,3,5,7,9,11,13,15,17,19): note = RNA residue
  misc_feature join(2,4,6,8,10,12,14,16,18,20): note = DNA residue
tttgacttccaaaccttata

SEQ ID NO: 500 - DNA, 20 bp, synthetic construct
  misc_feature 1..20: note = Description of Artificial Sequence: Synthetic oligonucleotide
  misc_feature 1..20: note = Description of Combined DNA/RNA Molecule: Synthetic oligonucleotide
  source 1..20: mol_type = other DNA
  modified_base 5: mod_base = OTHER; note = Uracil
  modified_base 7: mod_base = OTHER; note = Uracil
  modified_base 11: mod_base = OTHER; note = Uracil
  modified_base 17: mod_base = OTHER; note = Uracil
  misc_feature join(1,3,5,7,9,11,13,15,17,19): note = RNA residue
  misc_feature join(2,4,6,8,10,12,14,16,18,20): note = DNA residue
ctactataatttgacttcca

SEQ ID NO: 501 - DNA, 20 bp, synthetic construct
  misc_feature 1..20: note = Description of Artificial Sequence: Synthetic oligonucleotide
  misc_feature 1..20: note = Description of Combined DNA/RNA Molecule: Synthetic oligonucleotide
  source 1..20: mol_type = other DNA
  modified_base 1: mod_base = OTHER; note = Uracil
  modified_base 3: mod_base = OTHER; note = Uracil
  modified_base 11: mod_base = OTHER; note = Uracil
  modified_base 13: mod_base = OTHER; note = Uracil
  modified_base 17: mod_base = OTHER; note = Uracil
  misc_feature join(1,3,5,7,9,11,13,15,17,19): note = RNA residue
  misc_feature join(2,4,6,8,10,12,14,16,18,20): note = DNA residue
tctactataatttgacttcc

SEQ ID NO: 502 - DNA, 20 bp, synthetic construct
  misc_feature 1..20: note = Description of Artificial Sequence: Synthetic oligonucleotide
  misc_feature 1..20: note = Description of Combined DNA/RNA Molecule: Synthetic oligonucleotide
  source 1..20: mol_type = other DNA
  modified_base 1: mod_base = OTHER; note = Uracil
  modified_base 7: mod_base = OTHER; note = Uracil
  modified_base 9: mod_base = OTHER; note = Uracil
  modified_base 13: mod_base = OTHER; note = Uracil
  modified_base 19: mod_base = OTHER; note = Uracil
  misc_feature join(1,3,5,7,9,11,13,15,17,19): note = RNA residue
  misc_feature join(2,4,6,8,10,12,14,16,18,20): note = DNA residue
ttctactataatttgacttc

SEQ ID NO: 503 - DNA, 20 bp, synthetic construct
  misc_feature 1..20: note = Description of Artificial Sequence: Synthetic oligonucleotide
  misc_feature 1..20: note = Description of Combined DNA/RNA Molecule: Synthetic oligonucleotide
  source 1..20: mol_type = other DNA
  modified_base 3: mod_base = OTHER; note = Uracil
  modified_base 9: mod_base = OTHER; note = Uracil
  modified_base 11: mod_base = OTHER; note = Uracil
  modified_base 15: mod_base = OTHER; note = Uracil
  misc_feature join(1,3,5,7,9,11,13,15,17,19): note = RNA residue
  misc_feature join(2,4,6,8,10,12,14,16,18,20): note = DNA residue
cattctactataatttgact

SEQ ID NO: 504 - DNA, 20 bp, synthetic construct
  misc_feature 1..20: note = Description of Artificial Sequence: Synthetic oligonucleotide
  misc_feature 1..20: note = Description of Combined DNA/RNA Molecule: Synthetic oligonucleotide
  source 1..20: mol_type = other DNA
  modified_base 5: mod_base = OTHER; note = Uracil
  modified_base 7: mod_base = OTHER; note = Uracil
  modified_base 15: mod_base = OTHER; note = Uracil
  modified_base 17: mod_base = OTHER; note = Uracil
  misc_feature join(1,3,5,7,9,11,13,15,17,19): note = RNA residue
  misc_feature join(2,4,6,8,10,12,14,16,18,20): note = DNA residue
acattctactataatttgac

SEQ ID NO: 505 - DNA, 20 bp, synthetic construct
  misc_feature 1..20: note = Description of Artificial Sequence: Synthetic oligonucleotide
  misc_feature 1..20: note = Description of Combined DNA/RNA Molecule: Synthetic oligonucleotide
  source 1..20: mol_type = other DNA
  modified_base 3: mod_base = OTHER; note = Uracil
  modified_base 9: mod_base = OTHER; note = Uracil
  modified_base 15: mod_base = OTHER; note = Uracil
  modified_base 17: mod_base = OTHER; note = Uracil
  misc_feature join(1,3,5,7,9,11,13,15,17,19): note = RNA residue
  misc_feature join(2,4,6,8,10,12,14,16,18,20): note = DNA residue
gatacacattctactataat

SEQ ID NO: 506 - DNA, 20 bp, synthetic construct
  misc_feature 1..20: note = Description of Artificial Sequence: Synthetic oligonucleotide
  misc_feature 1..20: note = Description of Combined DNA/RNA Molecule: Synthetic oligonucleotide
  source 1..20: mol_type = other DNA
  modified_base 11: mod_base = OTHER; note = Uracil
  modified_base 13: mod_base = OTHER; note = Uracil
  misc_feature join(1,3,5,7,9,11,13,15,17,19): note = RNA residue
  misc_feature join(2,4,6,8,10,12,14,16,18,20): note = DNA residue
agatacacattctactataa

SEQ ID NO: 507 - DNA, 20 bp, synthetic construct
  misc_feature 1..20: note = Description of Artificial Sequence: Synthetic oligonucleotide
  misc_feature 1..20: note = Description of Combined DNA/RNA Molecule: Synthetic oligonucleotide
  source 1..20: mol_type = other DNA
  modified_base 1: mod_base = OTHER; note = Uracil
  modified_base 5: mod_base = OTHER; note = Uracil
  modified_base 11: mod_base = OTHER; note = Uracil
  modified_base 17: mod_base = OTHER; note = Uracil
  modified_base 19: mod_base = OTHER; note = Uracil
  misc_feature join(1,3,5,7,9,11,13,15,17,19): note = RNA residue
  misc_feature join(2,4,6,8,10,12,14,16,18,20): note = DNA residue
tagatacacattctactata

SEQ ID NO: 508 - DNA, 20 bp, synthetic construct
  misc_feature 1..20: note = Description of Artificial Sequence: Synthetic oligonucleotide
  misc_feature 1..20: note = Description of Combined DNA/RNA Molecule: Synthetic oligonucleotide
  source 1..20: mol_type = other DNA
  modified_base 1: mod_base = OTHER; note = Uracil
  modified_base 13: mod_base = OTHER; note = Uracil
  modified_base 15: mod_base = OTHER; note = Uracil
  misc_feature join(1,3,5,7,9,11,13,15,17,19): note = RNA residue
  misc_feature join(2,4,6,8,10,12,14,16,18,20): note = DNA residue
ttagatacacattctactat

SEQ ID NO: 509 - DNA, 20 bp, synthetic construct
  misc_feature 1..20: note = Description of Artificial Sequence: Synthetic oligonucleotide
  misc_feature 1..20: note = Description of Combined DNA/RNA Molecule: Synthetic oligonucleotide
  source 1..20: mol_type = other DNA
  modified_base 1: mod_base = OTHER; note = Uracil
  modified_base 3: mod_base = OTHER; note = Uracil
  modified_base 7: mod_base = OTHER; note = Uracil
  modified_base 13: mod_base = OTHER; note = Uracil
  modified_base 19: mod_base = OTHER; note = Uracil
  misc_feature join(1,3,5,7,9,11,13,15,17,19): note = RNA residue
  misc_feature join(2,4,6,8,10,12,14,16,18,20): note = DNA residue
tttagatacacattctacta

SEQ ID NO: 510 - DNA, 20 bp, synthetic construct
  misc_feature 1..20: note = Description of Artificial Sequence: Synthetic oligonucleotide
  misc_feature 1..20: note = Description of Combined DNA/RNA Molecule: Synthetic oligonucleotide
  source 1..20: mol_type = other DNA
  modified_base 3: mod_base = OTHER; note = Uracil
  modified_base 15: mod_base = OTHER; note = Uracil
  modified_base 17: mod_base = OTHER; note = Uracil
  misc_feature join(1,3,5,7,9,11,13,15,17,19): note = RNA residue
  misc_feature join(2,4,6,8,10,12,14,16,18,20): note = DNA residue
atttagatacacattctact

SEQ ID NO: 511 - DNA, 20 bp, synthetic construct
  misc_feature 1..20: note = Description of Artificial Sequence: Synthetic oligonucleotide
  misc_feature 1..20: note = Description of Combined DNA/RNA Molecule: Synthetic oligonucleotide
  source 1..20: mol_type = other DNA
  modified_base 1: mod_base = OTHER; note = Uracil
  modified_base 3: mod_base = OTHER; note = Uracil
  modified_base 5: mod_base = OTHER; note = Uracil
  modified_base 9: mod_base = OTHER; note = Uracil
  modified_base 15: mod_base = OTHER; note = Uracil
  misc_feature join(1,3,5,7,9,11,13,15,17,19): note = RNA residue
  misc_feature join(2,4,6,8,10,12,14,16,18,20): note = DNA residue
tatttagatacacattctac

SEQ ID NO: 512 - DNA, 20 bp, synthetic construct
  misc_feature 1..20: note = Description of Artificial Sequence: Synthetic oligonucleotide
  misc_feature 1..20: note = Description of Combined DNA/RNA Molecule: Synthetic oligonucleotide
  source 1..20: mol_type = other DNA
  modified_base 5: mod_base = OTHER; note = Uracil
  modified_base 17: mod_base = OTHER; note = Uracil
  modified_base 19: mod_base = OTHER; note = Uracil
  misc_feature join(1,3,5,7,9,11,13,15,17,19): note = RNA residue
  misc_feature join(2,4,6,8,10,12,14,16,18,20): note = DNA residue
ctatttagatacacattcta

SEQ ID NO: 513 - DNA, 20 bp, synthetic construct
  misc_feature 1..20: note = Description of Artificial Sequence: Synthetic oligonucleotide
  misc_feature 1..20: note = Description of Combined DNA/RNA Molecule: Synthetic oligonucleotide
  source 1..20: mol_type = other DNA
  modified_base 7: mod_base = OTHER; note = Uracil
  modified_base 19: mod_base = OTHER; note = Uracil
  misc_feature join(1,3,5,7,9,11,13,15,17,19): note = RNA residue
  misc_feature join(2,4,6,8,10,12,14,16,18,20): note = DNA residue
cactatttagatacacattc

SEQ ID NO: 514 - DNA, 20 bp, synthetic construct
  misc_feature 1..20: note = Description of Artificial Sequence: Synthetic oligonucleotide
  misc_feature 1..20: note = Description of Combined DNA/RNA Molecule: Synthetic oligonucleotide
  source 1..20: mol_type = other DNA
  modified_base 9: mod_base = OTHER; note = Uracil
  misc_feature join(1,3,5,7,9,11,13,15,17,19): note = RNA residue
  misc_feature join(2,4,6,8,10,12,14,16,18,20): note = DNA residue
gtcactatttagatacacat

SEQ ID NO: 515 - DNA, 20 bp, synthetic construct
  misc_feature 1..20: note = Description of Artificial Sequence: Synthetic oligonucleotide
  misc_feature 1..20: note = Description of Combined DNA/RNA Molecule: Synthetic oligonucleotide
  source 1..20: mol_type = other DNA
  modified_base 3: mod_base = OTHER; note = Uracil
  modified_base 7: mod_base = OTHER; note = Uracil
  modified_base 9: mod_base = OTHER; note = Uracil
  modified_base 11: mod_base = OTHER; note = Uracil
  modified_base 15: mod_base = OTHER; note = Uracil
  misc_feature join(1,3,5,7,9,11,13,15,17,19): note = RNA residue
  misc_feature join(2,4,6,8,10,12,14,16,18,20): note = DNA residue
agtcactatttagatacaca

SEQ ID NO: 516 - DNA, 20 bp, synthetic construct
  misc_feature 1..20: note = Description of Artificial Sequence: Synthetic oligonucleotide
  misc_feature 1..20: note = Description of Combined DNA/RNA Molecule: Synthetic oligonucleotide
  source 1..20: mol_type = other DNA
  modified_base 11: mod_base = OTHER; note = Uracil
  misc_feature join(1,3,5,7,9,11,13,15,17,19): note = RNA residue
  misc_feature join(2,4,6,8,10,12,14,16,18,20): note = DNA residue
cagtcactatttagatacac

SEQ ID NO: 517 - DNA, 20 bp, synthetic construct
  misc_feature 1..20: note = Description of Artificial Sequence: Synthetic oligonucleotide
  misc_feature 1..20: note = Description of Combined DNA/RNA Molecule: Synthetic oligonucleotide
  source 1..20: mol_type = other DNA
  modified_base 13: mod_base = OTHER; note = Uracil
  misc_feature join(1,3,5,7,9,11,13,15,17,19): note = RNA residue
  misc_feature join(2,4,6,8,10,12,14,16,18,20): note = DNA residue
agcagtcactatttagatac

SEQ ID NO: 518 - DNA, 20 bp, synthetic construct
  misc_feature 1..20: note = Description of Artificial Sequence: Synthetic oligonucleotide
  misc_feature 1..20: note = Description of Combined DNA/RNA Molecule: Synthetic oligonucleotide
  source 1..20: mol_type = other DNA
  modified_base 7: mod_base = OTHER; note = Uracil
  modified_base 11: mod_base = OTHER; note = Uracil
  modified_base 13: mod_base = OTHER; note = Uracil
  modified_base 15: mod_base = OTHER; note = Uracil
  modified_base 19: mod_base = OTHER; note = Uracil
  misc_feature join(1,3,5,7,9,11,13,15,17,19): note = RNA residue
  misc_feature join(2,4,6,8,10,12,14,16,18,20): note = DNA residue
aagcagtcactatttagata

SEQ ID NO: 519 - DNA, 20 bp, synthetic construct
  misc_feature 1..20: note = Description of Artificial Sequence: Synthetic oligonucleotide
  misc_feature 1..20: note = Description of Combined DNA/RNA Molecule: Synthetic oligonucleotide
  source 1..20: mol_type = other DNA
  modified_base 15: mod_base = OTHER; note = Uracil
  misc_feature join(1,3,5,7,9,11,13,15,17,19): note = RNA residue
  misc_feature join(2,4,6,8,10,12,14,16,18,20): note = DNA residue
aaagcagtcactatttagat

SEQ ID NO: 520 - DNA, 20 bp, synthetic construct
  misc_feature 1..20: note = Description of Artificial Sequence: Synthetic oligonucleotide
  misc_feature 1..20: note = Description of Combined DNA/RNA Molecule: Synthetic oligonucleotide
  source 1..20: mol_type = other DNA
  modified_base 9: mod_base = OTHER; note = Uracil
  modified_base 13: mod_base = OTHER; note = Uracil
  modified_base 15: mod_base = OTHER; note = Uracil
  modified_base 17: mod_base = OTHER; note = Uracil
  misc_feature join(1,3,5,7,9,11,13,15,17,19): note = RNA residue
  misc_feature join(2,4,6,8,10,12,14,16,18,20): note = DNA residue
caaagcagtcactatttaga

SEQ ID NO: 521 - DNA, 20 bp, synthetic construct
  misc_feature 1..20: note = Description of Artificial Sequence: Synthetic oligonucleotide
  misc_feature 1..20: note = Description of Combined DNA/RNA Molecule: Synthetic oligonucleotide
  source 1..20: mol_type = other DNA
  modified_base 17: mod_base = OTHER; note = Uracil
  misc_feature join(1,3,5,7,9,11,13,15,17,19): note = RNA residue
  misc_feature join(2,4,6,8,10,12,14,16,18,20): note = DNA residue
gcaaagcagtcactatttag

SEQ ID NO: 522 - DNA, 20 bp, synthetic construct
  misc_feature 1..20: note = Description of Artificial Sequence: Synthetic oligonucleotide
  misc_feature 1..20: note = Description of Combined DNA/RNA Molecule: Synthetic oligonucleotide
  source 1..20: mol_type = other DNA
  modified_base 11: mod_base = OTHER; note = Uracil
  modified_base 15: mod_base = OTHER; note = Uracil
  modified_base 17: mod_base = OTHER; note = Uracil
  modified_base 19: mod_base = OTHER; note = Uracil
  misc_feature join(1,3,5,7,9,11,13,15,17,19): note = RNA residue
  misc_feature join(2,4,6,8,10,12,14,16,18,20): note = DNA residue
ggcaaagcagtcactattta

SEQ ID NO: 523 - DNA, 20 bp, synthetic construct
  misc_feature 1..20: note = Description of Artificial Sequence: Synthetic oligonucleotide
  misc_feature 1..20: note = Description of Combined DNA/RNA Molecule: Synthetic oligonucleotide
  source 1..20: mol_type = other DNA
  modified_base 1: mod_base = OTHER; note = Uracil
  modified_base 19: mod_base = OTHER; note = Uracil
  misc_feature join(1,3,5,7,9,11,13,15,17,19): note = RNA residue
  misc_feature join(2,4,6,8,10,12,14,16,18,20): note = DNA residue
tggcaaagcagtcactattt

SEQ ID NO: 524 - DNA, 20 bp, synthetic construct
  misc_feature 1..20: note = Description of Artificial Sequence: Synthetic oligonucleotide
  misc_feature 1..20: note = Description of Combined DNA/RNA Molecule: Synthetic oligonucleotide
  source 1..20: mol_type = other DNA
  modified_base 3: mod_base = OTHER; note = Uracil
  misc_feature join(1,3,5,7,9,11,13,15,17,19): note = RNA residue
  misc_feature join(2,4,6,8,10,12,14,16,18,20): note = DNA residue
aatggcaaagcagtcactat

SEQ ID NO: 525 - DNA, 20 bp, synthetic construct
  misc_feature 1..20: note = Description of Artificial Sequence: Synthetic oligonucleotide
  misc_feature 1..20: note = Description of Combined DNA/RNA Molecule: Synthetic oligonucleotide
  source 1..20: mol_type = other DNA
  modified_base 15: mod_base = OTHER; note = Uracil
  modified_base 19: mod_base = OTHER; note = Uracil
  misc_feature join(1,3,5,7,9,11,13,15,17,19): note = RNA residue
  misc_feature join(2,4,6,8,10,12,14,16,18,20): note = DNA residue
aaatggcaaagcagtcacta

SEQ ID NO: 526 - DNA, 20 bp, synthetic construct
  misc_feature 1..20: note = Description of Artificial Sequence: Synthetic oligonucleotide
  misc_feature 1..20: note = Description of Combined DNA/RNA Molecule: Synthetic oligonucleotide
  source 1..20: mol_type = other DNA
  modified_base 5: mod_base = OTHER; note = Uracil
  misc_feature join(1,3,5,7,9,11,13,15,17,19): note = RNA residue
  misc_feature join(2,4,6,8,10,12,14,16,18,20): note = DNA residue
gaaatggcaaagcagtcact

SEQ ID NO: 527 - DNA, 20 bp, synthetic construct
  misc_feature 1..20: note = Description of Artificial Sequence: Synthetic oligonucleotide
  misc_feature 1..20: note = Description of Combined DNA/RNA Molecule: Synthetic oligonucleotide
  source 1..20: mol_type = other DNA
  modified_base 3: mod_base = OTHER; note = Uracil
  modified_base 19: mod_base = OTHER; note = Uracil
  misc_feature join(1,3,5,7,9,11,13,15,17,19): note = RNA residue
  misc_feature join(2,4,6,8,10,12,14,16,18,20): note = DNA residue
aatgaaatggcaaagcagtc

SEQ ID NO: 528 - DNA, 20 bp, synthetic construct
  misc_feature 1..20: note = Description of Artificial Sequence: Synthetic oligonucleotide
  misc_feature 1..20: note = Description of Combined DNA/RNA Molecule: Synthetic oligonucleotide
  source 1..20: mol_type = other DNA
  modified_base 5: mod_base = OTHER; note = Uracil
  modified_base 15: mod_base = OTHER; note = Uracil
  misc_feature join(1,3,5,7,9,11,13,15,17,19): note = RNA residue
  misc_feature join(2,4,6,8,10,12,14,16,18,20): note = DNA residue
aggtttgaatgaaatggcaa

SEQ ID NO: 529 - DNA, 20 bp, synthetic construct
  misc_feature 1..20: note = Description of Artificial Sequence: Synthetic oligonucleotide
  misc_feature 1..20: note = Description of Combined DNA/RNA Molecule: Synthetic oligonucleotide
  source 1..20: mol_type = other DNA
  modified_base 5: mod_base = OTHER; note = Uracil
  modified_base 7: mod_base = OTHER; note = Uracil
  modified_base 11: mod_base = OTHER; note = Uracil
  misc_feature join(1,3,5,7,9,11,13,15,17,19): note = RNA residue
  misc_feature join(2,4,6,8,10,12,14,16,18,20): note = DNA residue
caggtttgaatgaaatggca

SEQ ID NO: 530 - DNA, 20 bp, synthetic construct
  misc_feature 1..20: note = Description of Artificial Sequence: Synthetic oligonucleotide
  misc_feature 1..20: note = Description of Combined DNA/RNA Molecule: Synthetic oligonucleotide
  source 1..20: mol_type = other DNA
  modified_base 1: mod_base = OTHER; note = Uracil
  modified_base 7: mod_base = OTHER; note = Uracil
  modified_base 17: mod_base = OTHER; note = Uracil
  misc_feature join(1,3,5,7,9,11,13,15,17,19): note = RNA residue
  misc_feature join(2,4,6,8,10,12,14,16,18,20): note = DNA residue
tcaggtttgaatgaaatggc

SEQ ID NO: 531 - DNA, 20 bp, synthetic construct
  misc_feature 1..20: note = Description of Artificial Sequence: Synthetic oligonucleotide
  misc_feature 1..20: note = Description of Combined DNA/RNA Molecule: Synthetic oligonucleotide
  source 1..20: mol_type = other DNA
  modified_base 7: mod_base = OTHER; note = Uracil
  modified_base 9: mod_base = OTHER; note = Uracil
  modified_base 13: mod_base = OTHER; note = Uracil
  misc_feature join(1,3,5,7,9,11,13,15,17,19): note = RNA residue
  misc_feature join(2,4,6,8,10,12,14,16,18,20): note = DNA residue
gtcaggtttgaatgaaatgg

SEQ ID NO: 532 - DNA, 20 bp, synthetic construct
  misc_feature 1..20: note = Description of Artificial Sequence: Synthetic oligonucleotide
  misc_feature 1..20: note = Description of Combined DNA/RNA Molecule: Synthetic oligonucleotide
  source 1..20: mol_type = other DNA
  modified_base 3: mod_base = OTHER; note = Uracil
  modified_base 5: mod_base = OTHER; note = Uracil
  modified_base 11: mod_base = OTHER; note = Uracil
  misc_feature join(1,3,5,7,9,11,13,15,17,19): note = RNA residue
  misc_feature join(2,4,6,8,10,12,14,16,18,20): note = DNA residue
cttgtcaggtttgaatgaaa

SEQ ID NO: 533 - DNA, 20 bp, synthetic construct
  misc_feature 1..20: note = Description of Artificial Sequence: Synthetic oligonucleotide
  misc_feature 1..20: note = Description of Combined DNA/RNA Molecule: Synthetic oligonucleotide
  source 1..20: mol_type = other DNA
  modified_base 3: mod_base = OTHER; note = Uracil
  modified_base 9: mod_base = OTHER; note = Uracil
  modified_base 15: mod_base = OTHER; note = Uracil
  modified_base 17: mod_base = OTHER; note = Uracil
  misc_feature join(1,3,5,7,9,11,13,15,17,19): note = RNA residue
  misc_feature join(2,4,6,8,10,12,14,16,18,20): note = DNA residue
cttagagatagacttgtcag

SEQ ID NO: 534 - DNA, 20 bp, synthetic construct
  misc_feature 1..20: note = Description of Artificial Sequence: Synthetic oligonucleotide
  misc_feature 1..20: note = Description of Combined DNA/RNA Molecule: Synthetic oligonucleotide
  source 1..20: mol_type = other DNA
  modified_base 1: mod_base = OTHER; note = Uracil
  modified_base 3: mod_base = OTHER; note = Uracil
  modified_base 15: mod_base = OTHER; note = Uracil
  misc_feature join(1,3,5,7,9,11,13,15,17,19): note = RNA residue
  misc_feature join(2,4,6,8,10,12,14,16,18,20): note = DNA residue
tcttagagatagacttgtca

SEQ ID NO: 535 - DNA, 20 bp, synthetic construct
  misc_feature 1..20: note = Description of Artificial Sequence: Synthetic oligonucleotide
  misc_feature 1..20: note = Description of Combined DNA/RNA Molecule: Synthetic oligonucleotide
  source 1..20: mol_type = other DNA
  modified_base 5: mod_base = OTHER; note = Uracil
  modified_base 11: mod_base = OTHER; note = Uracil
  modified_base 17: mod_base = OTHER; note = Uracil
  modified_base 19: mod_base = OTHER; note = Uracil
  misc_feature join(1,3,5,7,9,11,13,15,17,19): note = RNA residue
  misc_feature join(2,4,6,8,10,12,14,16,18,20): note = DNA residue
ctcttagagatagacttgtc

SEQ ID NO: 536 - DNA, 20 bp, synthetic construct
  misc_feature 1..20: note = Description of Artificial Sequence: Synthetic oligonucleotide
  misc_feature 1..20: note = Description of Combined DNA/RNA Molecule: Synthetic oligonucleotide
  source 1..20: mol_type = other DNA
  modified_base 3: mod_base = OTHER; note = Uracil
  modified_base 5: mod_base = OTHER; note = Uracil
  modified_base 17: mod_base = OTHER; note = Uracil
  misc_feature join(1,3,5,7,9,11,13,15,17,19): note = RNA residue
  misc_feature join(2,4,6,8,10,12,14,16,18,20): note = DNA residue
gctcttagagatagacttgt

SEQ ID NO: 537 - DNA, 20 bp, synthetic construct
  misc_feature 1..20: note = Description of Artificial Sequence: Synthetic oligonucleotide
  misc_feature 1..20: note = Description of Combined DNA/RNA Molecule: Synthetic oligonucleotide
  source 1..20: mol_type = other DNA
  modified_base 7: mod_base = OTHER; note = Uracil
  modified_base 13: mod_base = OTHER; note = Uracil
  modified_base 19: mod_base = OTHER; note = Uracil
  misc_feature join(1,3,5,7,9,11,13,15,17,19): note = RNA residue
  misc_feature join(2,4,6,8,10,12,14,16,18,20): note = DNA residue
ggctcttagagatagacttg

SEQ ID NO: 538 - DNA, 20 bp, synthetic construct
  misc_feature 1..20: note = Description of Artificial Sequence: Synthetic oligonucleotide
  misc_feature 1..20: note = Description of Combined DNA/RNA Molecule: Synthetic oligonucleotide
  source 1..20: mol_type = other DNA
  modified_base 5: mod_base = OTHER; note = Uracil
  modified_base 7: mod_base = OTHER; note = Uracil
  modified_base 19: mod_base = OTHER; note = Uracil
  misc_feature join(1,3,5,7,9,11,13,15,17,19): note = RNA residue
  misc_feature join(2,4,6,8,10,12,14,16,18,20): note = DNA residue
cggctcttagagatagactt

SEQ ID NO: 539 - DNA, 20 bp, synthetic construct
  misc_feature 1..20: note = Description of Artificial Sequence: Synthetic oligonucleotide
  misc_feature 1..20: note = Description of Combined DNA/RNA Molecule: Synthetic oligonucleotide
  source 1..20: mol_type = other DNA
  modified_base 9: mod_base = OTHER; note = Uracil
  modified_base 15: mod_base = OTHER; note = Uracil
  misc_feature join(1,3,5,7,9,11,13,15,17,19): note = RNA residue
  misc_feature join(2,4,6,8,10,12,14,16,18,20): note = DNA residue
gcggctcttagagatagact

SEQ ID NO: 540 - DNA, 20 bp, synthetic construct
  misc_feature 1..20: note = Description of Artificial Sequence: Synthetic oligonucleotide
  misc_feature 1..20: note = Description of Combined DNA/RNA Molecule: Synthetic oligonucleotide
  source 1..20: mol_type = other DNA
  modified_base 1: mod_base = OTHER; note = Uracil
  modified_base 11: mod_base = OTHER; note = Uracil
  modified_base 17: mod_base = OTHER; note = Uracil
  misc_feature join(1,3,5,7,9,11,13,15,17,19): note = RNA residue
  misc_feature join(2,4,6,8,10,12,14,16,18,20): note = DNA residue
tggcggctcttagagataga

SEQ ID NO: 541 - DNA, 20 bp, synthetic construct
  misc_feature 1..20: note = Description of Artificial Sequence: Synthetic oligonucleotide
  misc_feature 1..20: note = Description of Combined DNA/RNA Molecule: Synthetic oligonucleotide
  source 1..20: mol_type = other DNA
  modified_base 1: mod_base = OTHER; note = Uracil
  modified_base 3: mod_base = OTHER; note = Uracil
  modified_base 13: mod_base = OTHER; note = Uracil
  modified_base 19: mod_base = OTHER; note = Uracil
  misc_feature join(1,3,5,7,9,11,13,15,17,19): note = RNA residue
  misc_feature join(2,4,6,8,10,12,14,16,18,20): note = DNA residue
tctggcggctcttagagata

SEQ ID NO: 542 - DNA, 20 bp, synthetic construct
  misc_feature 1..20: note = Description of Artificial Sequence: Synthetic oligonucleotide
  misc_feature 1..20: note = Description of Combined DNA/RNA Molecule: Synthetic oligonucleotide
  source 1..20: mol_type = other DNA
  modified_base 11: mod_base = OTHER; note = Uracil
  modified_base 13: mod_base = OTHER; note = Uracil
  misc_feature join(1,3,5,7,9,11,13,15,17,19): note = RNA residue
  misc_feature join(2,4,6,8,10,12,14,16,18,20): note = DNA residue
atctggcggctcttagagat

SEQ ID NO: 543 - DNA, 20 bp, synthetic construct
  misc_feature 1..20: note = Description of Artificial Sequence: Synthetic oligonucleotide
  misc_feature 1..20: note = Description of Combined DNA/RNA Molecule: Synthetic oligonucleotide
  source 1..20: mol_type = other DNA
  modified_base 3: mod_base = OTHER; note = Uracil
  modified_base 5: mod_base = OTHER; note = Uracil
  modified_base 15: mod_base = OTHER; note = Uracil
  misc_feature join(1,3,5,7,9,11,13,15,17,19): note = RNA residue
  misc_feature join(2,4,6,8,10,12,14,16,18,20): note = DNA residue
aatctggcggctcttagaga

SEQ ID NO: 544 - DNA, 20 bp, synthetic construct
  misc_feature 1..20: note = Description of Artificial Sequence: Synthetic oligonucleotide
  misc_feature 1..20: note = Description of Combined DNA/RNA Molecule: Synthetic oligonucleotide
  source 1..20: mol_type = other DNA
  modified_base 1: mod_base = OTHER; note = Uracil
  misc_feature join(1,3,5,7,9,11,13,15,17,19): note = RNA residue
  misc_feature join(2,4,6,8,10,12,14,16,18,20): note = DNA residue
tactgcacacatggaaatct

SEQ ID NO: 545 - DNA, 20 bp, synthetic construct
  misc_feature 1..20: note = Description of Artificial Sequence: Synthetic oligonucleotide
  misc_feature 1..20: note = Description of Combined DNA/RNA Molecule: Synthetic oligonucleotide
  source 1..20: mol_type = other DNA
  modified_base 5: mod_base = OTHER; note = Uracil
  modified_base 13: mod_base = OTHER; note = Uracil
  modified_base 19: mod_base = OTHER; note = Uracil
  misc_feature join(1,3,5,7,9,11,13,15,17,19): note = RNA residue
  misc_feature join(2,4,6,8,10,12,14,16,18,20): note = DNA residue
atactgcacacatggaaatc

SEQ ID NO: 546 - DNA, 20 bp, synthetic construct
  misc_feature 1..20: note = Description of Artificial Sequence: Synthetic oligonucleotide
  misc_feature 1..20: note = Description of Combined DNA/RNA Molecule: Synthetic oligonucleotide
  source 1..20: mol_type = other DNA
  modified_base 3: mod_base = OTHER; note = Uracil
  misc_feature join(1,3,5,7,9,11,13,15,17,19): note = RNA residue
  misc_feature join(2,4,6,8,10,12,14,16,18,20): note = DNA residue
aatactgcacacatggaaat

SEQ ID NO: 547 - DNA, 20 bp, synthetic construct
  misc_feature 1..20: note = Description of Artificial Sequence: Synthetic oligonucleotide
  misc_feature 1..20: note = Description of Combined DNA/RNA Molecule: Synthetic oligonucleotide
  source 1..20: mol_type = other DNA
  modified_base 5: mod_base = OTHER; note = Uracil
  misc_feature join(1,3,5,7,9,11,13,15,17,19): note = RNA residue
  misc_feature join(2,4,6,8,10,12,14,16,18,20): note = DNA residue
ataatactgcacacatggaa

SEQ ID NO: 548 - DNA, 20 bp, synthetic construct
  misc_feature 1..20: note = Description of Artificial Sequence: Synthetic oligonucleotide
  misc_feature 1..20: note = Description of Combined DNA/RNA Molecule: Synthetic oligonucleotide
  source 1..20: mol_type = other DNA
  modified_base 3: mod_base = OTHER; note = Uracil
  modified_base 5: mod_base = OTHER; note = Uracil
  modified_base 11: mod_base = OTHER; note = Uracil
  modified_base 19: mod_base = OTHER; note = Uracil
  misc_feature join(1,3,5,7,9,11,13,15,17,19): note = RNA residue
  misc_feature join(2,4,6,8,10,12,14,16,18,20): note = DNA residue
cttataatactgcacacatg

SEQ ID NO: 549 - DNA, 20 bp, synthetic construct
  misc_feature 1..20: note = Description of Artificial Sequence: Synthetic oligonucleotide
  misc_feature 1..20: note = Description of Combined DNA/RNA Molecule: Synthetic oligonucleotide
  source 1..20: mol_type = other DNA
  modified_base 5: mod_base = OTHER; note = Uracil
  modified_base 7: mod_base = OTHER; note = Uracil
  modified_base 13: mod_base = OTHER; note = Uracil
  misc_feature join(1,3,5,7,9,11,13,15,17,19): note = RNA residue
  misc_feature join(2,4,6,8,10,12,14,16,18,20): note = DNA residue
aacttataatactgcacaca

SEQ ID NO: 550 - DNA, 20 bp, synthetic construct
  misc_feature 1..20: note = Description of Artificial Sequence: Synthetic oligonucleotide
  misc_feature 1..20: note = Description of Combined DNA/RNA Molecule: Synthetic oligonucleotide
  source 1..20: mol_type = other DNA
  modified_base 1: mod_base = OTHER; note = Uracil
  modified_base 5: mod_base = OTHER; note = Uracil
  modified_base 11: mod_base = OTHER; note = Uracil
  misc_feature join(1,3,5,7,9,11,13,15,17,19): note = RNA residue
  misc_feature join(2,4,6,8,10,12,14,16,18,20): note = DNA residue
taacttataatactgcacac

SEQ ID NO: 551 - DNA, 20 bp, synthetic construct
  misc_feature 1..20: note = Description of Artificial Sequence: Synthetic oligonucleotide
  misc_feature 1..20: note = Description of Combined DNA/RNA Molecule: Synthetic oligonucleotide
  source 1..20: mol_type = other DNA
  modified_base 7: mod_base = OTHER; note = Uracil
  modified_base 9: mod_base = OTHER; note = Uracil
  modified_base 15: mod_base = OTHER; note = Uracil
  misc_feature join(1,3,5,7,9,11,13,15,17,19): note = RNA residue
  misc_feature join(2,4,6,8,10,12,14,16,18,20): note = DNA residue
ataacttataatactgcaca

SEQ ID NO: 552 - DNA, 20 bp, synthetic construct
  misc_feature 1..20: note = Description of Artificial Sequence: Synthetic oligonucleotide
  misc_feature 1..20: note = Description of Combined DNA/RNA Molecule: Synthetic oligonucleotide
  source 1..20: mol_type = other DNA
  modified_base 3: mod_base = OTHER; note = Uracil
  modified_base 7: mod_base = OTHER; note = Uracil
  modified_base 13: mod_base = OTHER; note = Uracil
  misc_feature join(1,3,5,7,9,11,13,15,17,19): note = RNA residue
  misc_feature join(2,4,6,8,10,12,14,16,18,20): note = DNA residue
gataacttataatactgcac

SEQ ID NO: 553 - DNA, 20 bp, synthetic construct
  misc_feature 1..20: note = Description of Artificial Sequence: Synthetic oligonucleotide
  misc_feature 1..20: note = Description of Combined DNA/RNA Molecule: Synthetic oligonucleotide
  source 1..20: mol_type = other DNA
  modified_base 1: mod_base = OTHER; note = Uracil
  modified_base 9: mod_base = OTHER; note = Uracil
  modified_base 11: mod_base = OTHER; note = Uracil
  modified_base 17: mod_base = OTHER; note = Uracil
  misc_feature join(1,3,5,7,9,11,13,15,17,19): note = RNA residue
  misc_feature join(2,4,6,8,10,12,14,16,18,20): note = DNA residue
tgataacttataatactgca

SEQ ID NO: 554 - DNA, 20 bp, synthetic construct
  misc_feature 1..20: note = Description of Artificial Sequence: Synthetic oligonucleotide
  misc_feature 1..20: note = Description of Combined DNA/RNA Molecule: Synthetic oligonucleotide
  source 1..20: mol_type = other DNA
  modified_base 5: mod_base = OTHER; note = Uracil
  modified_base 9: mod_base = OTHER; note = Uracil
  modified_base 15: mod_base = OTHER; note = Uracil
  misc_feature join(1,3,5,7,9,11,13,15,17,19): note = RNA residue
  misc_feature join(2,4,6,8,10,12,14,16,18,20): note = DNA residue
atgataacttataatactgc

SEQ ID NO: 555 - DNA, 20 bp, synthetic construct
  misc_feature 1..20: note = Description of Artificial Sequence: Synthetic oligonucleotide
  misc_feature 1..20: note = Description of Combined DNA/RNA Molecule: Synthetic oligonucleotide
  source 1..20: mol_type = other DNA
  modified_base 3: mod_base = OTHER; note = Uracil
  modified_base 7: mod_base = OTHER; note = Uracil
  modified_base 15: mod_base = OTHER; note = Uracil
  modified_base 17: mod_base = OTHER; note = Uracil
  misc_feature join(1,3,5,7,9,11,13,15,17,19): note = RNA residue
  misc_feature join(2,4,6,8,10,12,14,16,18,20): note = DNA residue
gttccatgataacttataat

SEQ ID NO: 556 - DNA, 20 bp, synthetic construct
  misc_feature 1..20: note = Description of Artificial Sequence: Synthetic oligonucleotide
  misc_feature 1..20: note = Description of Combined DNA/RNA Molecule: Synthetic oligonucleotide
  source 1..20: mol_type = other DNA
  modified_base 3: mod_base = OTHER; note = Uracil
  modified_base 11: mod_base = OTHER; note = Uracil
  modified_base 15: mod_base = OTHER; note = Uracil
  misc_feature join(1,3,5,7,9,11,13,15,17,19): note = RNA residue
  misc_feature join(2,4,6,8,10,12,14,16,18,20): note = DNA residue
agttccatgataacttataa

SEQ ID NO: 557 - DNA, 20 bp, synthetic construct
  misc_feature 1..20: note = Description of Artificial Sequence: Synthetic oligonucleotide
  misc_feature 1..20: note = Description of Combined DNA/RNA Molecule: Synthetic oligonucleotide
  source 1..20: mol_type = other DNA
  modified_base 1: mod_base = OTHER; note = Uracil
  modified_base 5: mod_base = OTHER; note = Uracil
  modified_base 9: mod_base = OTHER; note = Uracil
  modified_base 17: mod_base = OTHER; note = Uracil
  modified_base 19: mod_base = OTHER; note = Uracil
  misc_feature join(1,3,5,7,9,11,13,15,17,19): note = RNA residue
  misc_feature join(2,4,6,8,10,12,14,16,18,20): note = DNA residue
tagttccatgataacttata

SEQ ID NO: 558 - DNA, 20 bp, synthetic construct
  misc_feature 1..20: note = Description of Artificial Sequence: Synthetic oligonucleotide
  misc_feature 1..20: note = Description of Combined DNA/RNA Molecule: Synthetic oligonucleotide
  source 1..20: mol_type = other DNA
  modified_base 5: mod_base = OTHER; note = Uracil
  modified_base 13: mod_base = OTHER; note = Uracil
  modified_base 17: mod_base = OTHER; note = Uracil
  misc_feature join(1,3,5,7,9,11,13,15,17,19): note = RNA residue
  misc_feature join(2,4,6,8,10,12,14,16,18,20): note = DNA residue
atagttccatgataacttat

SEQ ID NO: 559 - DNA, 20 bp, synthetic construct
  misc_feature 1..20: note = Description of Artificial Sequence: Synthetic oligonucleotide
  misc_feature 1..20: note = Description of Combined DNA/RNA Molecule: Synthetic oligonucleotide
  source 1..20: mol_type = other DNA
  modified_base 1: mod_base = OTHER; note = Uracil
  modified_base 3: mod_base = OTHER; note = Uracil
  modified_base 7: mod_base = OTHER; note = Uracil
  modified_base 11: mod_base = OTHER; note = Uracil
  modified_base 19: mod_base = OTHER; note = Uracil
  misc_feature join(1,3,5,7,9,11,13,15,17,19): note = RNA residue
  misc_feature join(2,4,6,8,10,12,14,16,18,20): note = DNA residue
tatagttccatgataactta

SEQ ID NO: 560 - DNA, 20 bp, synthetic construct
  misc_feature 1..20: note = Description of Artificial Sequence: Synthetic oligonucleotide
  misc_feature 1..20: note = Description of Combined DNA/RNA Molecule: Synthetic oligonucleotide
  source 1..20: mol_type = other DNA
  modified_base 1: mod_base = OTHER; note = Uracil
  modified_base 3: mod_base = OTHER; note = Uracil
  modified_base 7: mod_base = OTHER; note = Uracil
  modified_base 19: mod_base = OTHER; note = Uracil
  misc_feature join(1,3,5,7,9,11,13,15,17,19): note = RNA residue
  misc_feature join(2,4,6,8,10,12,14,16,18,20): note = DNA residue
tctgcgtccaccatatagtt

SEQ ID NO: 561 - DNA, 20 bp, synthetic construct
  misc_feature 1..20: note = Description of Artificial Sequence: Synthetic oligonucleotide
  misc_feature 1..20: note = Description of Combined DNA/RNA Molecule: Synthetic oligonucleotide
  source 1..20: mol_type = other DNA
  modified_base 15: mod_base = OTHER; note = Uracil
  modified_base 17: mod_base = OTHER; note = Uracil
  misc_feature join(1,3,5,7,9,11,13,15,17,19): note = RNA residue
  misc_feature join(2,4,6,8,10,12,14,16,18,20): note = DNA residue
gtctgcgtccaccatatagt

SEQ ID NO: 562 - DNA, 20 bp, synthetic construct
  misc_feature 1..20: note = Description of Artificial Sequence: Synthetic oligonucleotide
  misc_feature 1..20: note = Description of Combined DNA/RNA Molecule: Synthetic oligonucleotide
  source 1..20: mol_type = other DNA
  modified_base 3: mod_base = OTHER; note = Uracil
  modified_base 5: mod_base = OTHER; note = Uracil
  modified_base 9: mod_base = OTHER; note = Uracil
  misc_feature join(1,3,5,7,9,11,13,15,17,19): note = RNA residue
  misc_feature join(2,4,6,8,10,12,14,16,18,20): note = DNA residue
ggtctgcgtccaccatatag

SEQ ID NO: 563 - DNA, 20 bp, synthetic construct
  misc_feature 1..20: note = Description of Artificial Sequence: Synthetic oligonucleotide
  misc_feature 1..20: note = Description of Combined DNA/RNA Molecule: Synthetic oligonucleotide
  source 1..20: mol_type = other DNA
  modified_base 17: mod_base = OTHER; note = Uracil
  modified_base 19: mod_base = OTHER; note = Uracil
  misc_feature join(1,3,5,7,9,11,13,15,17,19): note = RNA residue
  misc_feature join(2,4,6,8,10,12,14,16,18,20): note = DNA residue
aggtctgcgtccaccatata

SEQ ID NO: 564 - DNA, 20 bp, synthetic construct
  misc_feature 1..20: note = Description of Artificial Sequence: Synthetic oligonucleotide
  misc_feature 1..20: note = Description of Combined DNA/RNA Molecule: Synthetic oligonucleotide
  source 1..20: mol_type = other DNA
  modified_base 5: mod_base = OTHER; note = Uracil
  modified_base 7: mod_base = OTHER; note = Uracil
  modified_base 11: mod_base = OTHER; note = Uracil
  misc_feature join(1,3,5,7,9,11,13,15,17,19): note = RNA residue
  misc_feature join(2,4,6,8,10,12,14,16,18,20): note = DNA residue
aaggtctgcgtccaccatat

SEQ ID NO: 565 - DNA, 20 bp, synthetic construct
  misc_feature 1..20: note = Description of Artificial Sequence: Synthetic oligonucleotide
  misc_feature 1..20: note = Description of Combined DNA/RNA Molecule: Synthetic oligonucleotide
  source 1..20: mol_type = other DNA
  modified_base 1: mod_base = OTHER; note = Uracil
  misc_feature join(1,3,5,7,9,11,13,15,17,19): note = RNA residue
  misc_feature join(2,4,6,8,10,12,14,16,18,20): note = DNA residue
ttctcaaggtctgcgtccac

SEQ ID NO: 566 - DNA, 20 bp, synthetic construct
  misc_feature 1..20: note = Description of Artificial Sequence: Synthetic oligonucleotide
  misc_feature 1..20: note = Description of Combined DNA/RNA Molecule: Synthetic oligonucleotide
  source 1..20: mol_type = other DNA
  modified_base 3: mod_base = OTHER; note = Uracil
  modified_base 5: mod_base = OTHER; note = Uracil
  modified_base 11: mod_base = OTHER; note = Uracil
  modified_base 13: mod_base = OTHER; note = Uracil
  modified_base 17: mod_base = OTHER; note = Uracil
  misc_feature join(1,3,5,7,9,11,13,15,17,19): note = RNA residue
  misc_feature join(2,4,6,8,10,12,14,16,18,20): note = DNA residue
gttctcaaggtctgcgtcca

SEQ ID NO: 567 - DNA, 20 bp, synthetic construct
  misc_feature 1..20: note = Description of Artificial Sequence: Synthetic oligonucleotide
  misc_feature 1..20: note = Description of Combined DNA/RNA Molecule: Synthetic oligonucleotide
  source 1..20: mol_type = other DNA
  modified_base 1: mod_base = OTHER; note = Uracil
  modified_base 3: mod_base = OTHER; note = Uracil
  misc_feature join(1,3,5,7,9,11,13,15,17,19): note = RNA residue
  misc_feature join(2,4,6,8,10,12,14,16,18,20): note = DNA residue
tgttctcaaggtctgcgtcc

SEQ ID NO: 568 - DNA, 20 bp, synthetic construct
  misc_feature 1..20: note = Description of Artificial Sequence: Synthetic oligonucleotide
  misc_feature 1..20: note = Description of Combined DNA/RNA Molecule: Synthetic oligonucleotide
  source 1..20: mol_type = other DNA
  modified_base 1: mod_base = OTHER; note = Uracil
  modified_base 5: mod_base = OTHER; note = Uracil
  modified_base 7: mod_base = OTHER; note = Uracil
  modified_base 13: mod_base = OTHER; note = Uracil
  modified_base 15: mod_base = OTHER; note = Uracil
  modified_base 19: mod_base = OTHER; note = Uracil
  misc_feature join(1,3,5,7,9,11,13,15,17,19): note = RNA residue
  misc_feature join(2,4,6,8,10,12,14,16,18,20): note = DNA residue
ttgttctcaaggtctgcgtc

SEQ ID NO: 569 - DNA, 20 bp, synthetic construct
  misc_feature 1..20: note = Description of Artificial Sequence: Synthetic oligonucleotide
  misc_feature 1..20: note = Description of Combined DNA/RNA Molecule: Synthetic oligonucleotide
  source 1..20: mol_type = other DNA
  modified_base 3: mod_base = OTHER; note = Uracil
  modified_base 5: mod_base = OTHER; note = Uracil
  misc_feature join(1,3,5,7,9,11,13,15,17,19): note = RNA residue
  misc_feature join(2,4,6,8,10,12,14,16,18,20): note = DNA residue
gttgttctcaaggtctgcgt

SEQ ID NO: 570 - DNA, 20 bp, synthetic construct
  misc_feature 1..20: note = Description of Artificial Sequence: Synthetic oligonucleotide
  misc_feature 1..20: note = Description of Combined DNA/RNA Molecule: Synthetic oligonucleotide
  source 1..20: mol_type = other DNA
  modified_base 3: mod_base = OTHER; note = Uracil
  modified_base 7: mod_base = OTHER; note = Uracil
  modified_base 9: mod_base = OTHER; note = Uracil
  modified_base 15: mod_base = OTHER; note = Uracil
  modified_base 17: mod_base = OTHER; note = Uracil
  misc_feature join(1,3,5,7,9,11,13,15,17,19): note = RNA residue
  misc_feature join(2,4,6,8,10,12,14,16,18,20): note = DNA residue
ggttgttctcaaggtctgcg

SEQ ID NO: 571 - DNA, 20 bp, synthetic construct
  misc_feature 1..20: note = Description of Artificial Sequence: Synthetic oligonucleotide
  misc_feature 1..20: note = Description of Combined DNA/RNA Molecule: Synthetic oligonucleotide
  source 1..20: mol_type = other DNA
  modified_base 5: mod_base = OTHER; note = Uracil
  modified_base 7: mod_base = OTHER; note = Uracil
  misc_feature join(1,3,5,7,9,11,13,15,17,19): note = RNA residue
  misc_feature join(2,4,6,8,10,12,14,16,18,20): note = DNA residue
aggttgttctcaaggtctgc

SEQ ID NO: 572 - DNA, 20 bp, synthetic construct
  misc_feature 1..20: note = Description of Artificial Sequence: Synthetic oligonucleotide
  misc_feature 1..20: note = Description of Combined DNA/RNA Molecule: Synthetic oligonucleotide
  source 1..20: mol_type = other DNA
  modified_base 1: mod_base = OTHER; note = Uracil
  modified_base 5: mod_base = OTHER; note = Uracil
  modified_base 9: mod_base = OTHER; note = Uracil
  modified_base 11: mod_base = OTHER; note = Uracil
  modified_base 17: mod_base = OTHER; note = Uracil
  modified_base 19: mod_base = OTHER; note = Uracil
  misc_feature join(1,3,5,7,9,11,13,15,17,19): note = RNA residue
  misc_feature join(2,4,6,8,10,12,14,16,18,20): note = DNA residue
taggttgttctcaaggtctg

SEQ ID NO: 573 - DNA, 20 bp, synthetic construct
  misc_feature 1..20: note = Description of Artificial Sequence: Synthetic oligonucleotide
  misc_feature 1..20: note = Description of Combined DNA/RNA Molecule: Synthetic oligonucleotide
  source 1..20: mol_type = other DNA
  modified_base 1: mod_base = OTHER; note = Uracil
  modified_base 7: mod_base = OTHER; note = Uracil
  modified_base 9: mod_base = OTHER; note = Uracil
  misc_feature join(1,3,5,7,9,11,13,15,17,19): note = RNA residue
  misc_feature join(2,4,6,8,10,12,14,16,18,20): note = DNA residue
ttaggttgttctcaaggtct

SEQ ID NO: 574 - DNA, 20 bp, synthetic construct
  misc_feature 1..20: note = Description of Artificial Sequence: Synthetic oligonucleotide
  misc_feature 1..20: note = Description of Combined DNA/RNA Molecule: Synthetic oligonucleotide
  source 1..20: mol_type = other DNA
  modified_base 1: mod_base = OTHER; note = Uracil
  modified_base 3: mod_base = OTHER; note = Uracil
  modified_base 7: mod_base = OTHER; note = Uracil
  modified_base 11: mod_base = OTHER; note = Uracil
  modified_base 13: mod_base = OTHER; note = Uracil
  modified_base 19: mod_base = OTHER; note = Uracil
  misc_feature join(1,3,5,7,9,11,13,15,17,19): note = RNA residue
  misc_feature join(2,4,6,8,10,12,14,16,18,20): note = DNA residue
tttaggttgttctcaaggtc

SEQ ID NO: 575 - DNA, 20 bp, synthetic construct
  misc_feature 1..20: note = Description of Artificial Sequence: Synthetic oligonucleotide
  misc_feature 1..20: note = Description of Combined DNA/RNA Molecule: Synthetic oligonucleotide
  source 1..20: mol_type = other DNA
  modified_base 3: mod_base = OTHER; note = Uracil
  modified_base 5: mod_base = OTHER; note = Uracil
  modified_base 9: mod_base = OTHER; note = Uracil
  modified_base 13: mod_base = OTHER; note = Uracil
  modified_base 15: mod_base = OTHER; note = Uracil
  misc_feature join(1,3,5,7,9,11,13,15,17,19): note = RNA residue
  misc_feature join(2,4,6,8,10,12,14,16,18,20): note = DNA residue
aatttaggttgttctcaagg

SEQ ID NO: 576 - DNA, 20 bp, synthetic construct
  misc_feature 1..20: note = Description of Artificial Sequence: Synthetic oligonucleotide
  misc_feature 1..20: note = Description of Combined DNA/RNA Molecule: Synthetic oligonucleotide
  source 1..20: mol_type = other DNA
  modified_base 5: mod_base = OTHER; note = Uracil
  modified_base 9: mod_base = OTHER; note = Uracil
  modified_base 15: mod_base = OTHER; note = Uracil
  modified_base 17: mod_base = OTHER; note = Uracil
  misc_feature join(1,3,5,7,9,11,13,15,17,19): note = RNA residue
  misc_feature join(2,4,6,8,10,12,14,16,18,20): note = DNA residue
cccataatttaggttgttct

SEQ ID NO: 577 - DNA, 20 bp, synthetic construct
  misc_feature 1..20: note = Description of Artificial Sequence: Synthetic oligonucleotide
  misc_feature 1..20: note = Description of Combined DNA/RNA Molecule: Synthetic oligonucleotide
  source 1..20: mol_type = other DNA
  modified_base 9: mod_base = OTHER; note = Uracil
  modified_base 11: mod_base = OTHER; note = Uracil
  modified_base 15: mod_base = OTHER; note = Uracil
  modified_base 19: mod_base = OTHER; note = Uracil
  misc_feature join(1,3,5,7,9,11,13,15,17,19): note = RNA residue
  misc_feature join(2,4,6,8,10,12,14,16,18,20): note = DNA residue
ccccataatttaggttgttc

SEQ ID NO: 578 - DNA, 20 bp, synthetic construct
  misc_feature 1..20: note = Description of Artificial Sequence: Synthetic oligonucleotide
  misc_feature 1..20: note = Description of Combined DNA/RNA Molecule: Synthetic oligonucleotide
  source 1..20: mol_type = other DNA
  modified_base 1: mod_base = OTHER; note = Uracil
  modified_base 7: mod_base = OTHER; note = Uracil
  modified_base 11: mod_base = OTHER; note = Uracil
  modified_base 17: mod_base = OTHER; note = Uracil
  modified_base 19: mod_base = OTHER; note = Uracil
  misc_feature join(1,3,5,7,9,11,13,15,17,19): note = RNA residue
  misc_feature join(2,4,6,8,10,12,14,16,18,20): note = DNA residue
tccccataatttaggttgtt

SEQ ID NO: 579 - DNA, 20 bp, synthetic construct
  misc_feature 1..20: note = Description of Artificial Sequence: Synthetic oligonucleotide
  misc_feature 1..20: note = Description of Combined DNA/RNA Molecule: Synthetic oligonucleotide
  source 1..20: mol_type = other DNA
  modified_base 11: mod_base = OTHER; note = Uracil
  modified_base 13: mod_base = OTHER; note = Uracil
  modified_base 17: mod_base = OTHER; note = Uracil
  misc_feature join(1,3,5,7,9,11,13,15,17,19): note = RNA residue
  misc_feature join(2,4,6,8,10,12,14,16,18,20): note = DNA residue
ctccccataatttaggttgt

SEQ ID NO: 580 - DNA, 20 bp, synthetic construct
  misc_feature 1..20: note = Description of Artificial Sequence: Synthetic oligonucleotide
  misc_feature 1..20: note = Description of Combined DNA/RNA Molecule: Synthetic oligonucleotide
  source 1..20: mol_type = other DNA
  modified_base 1: mod_base = OTHER; note = Uracil
  modified_base 3: mod_base = OTHER; note = Uracil
  modified_base 9: mod_base = OTHER; note = Uracil
  modified_base 13: mod_base = OTHER; note = Uracil
  modified_base 19: mod_base = OTHER; note = Uracil
  misc_feature join(1,3,5,7,9,11,13,15,17,19): note = RNA residue
  misc_feature join(2,4,6,8,10,12,14,16,18,20): note = DNA residue
tctccccataatttaggttg

SEQ ID NO: 581 - DNA, 20 bp, synthetic construct
  misc_feature 1..20: note = Description of Artificial Sequence: Synthetic oligonucleotide
  misc_feature 1..20: note = Description of Combined DNA/RNA Molecule: Synthetic oligonucleotide
  source 1..20: mol_type = other DNA
  modified_base 5: mod_base = OTHER; note = Uracil
  modified_base 7: mod_base = OTHER; note = Uracil
  modified_base 13: mod_base = OTHER; note = Uracil
  modified_base 17: mod_base = OTHER; note = Uracil
  misc_feature join(1,3,5,7,9,11,13,15,17,19): note = RNA residue
  misc_feature join(2,4,6,8,10,12,14,16,18,20): note = DNA residue
aaattctccccataatttag

SEQ ID NO: 582 - DNA, 20 bp, synthetic construct
  misc_feature 1..20: note = Description of Artificial Sequence: Synthetic oligonucleotide
  misc_feature 1..20: note = Description of Combined DNA/RNA Molecule: Synthetic oligonucleotide
  source 1..20: mol_type = other DNA
  modified_base 17: mod_base = OTHER; note = Uracil
  misc_feature join(1,3,5,7,9,11,13,15,17,19): note = RNA residue
  misc_feature join(2,4,6,8,10,12,14,16,18,20): note = DNA residue
caataaatggccaaaataat

SEQ ID NO: 583 - DNA, 20 bp, synthetic construct
  misc_feature 1..20: note = Description of Artificial Sequence: Synthetic oligonucleotide
  misc_feature 1..20: note = Description of Combined DNA/RNA Molecule: Synthetic oligonucleotide
  source 1..20: mol_type = other DNA
  modified_base 1: mod_base = OTHER; note = Uracil
  modified_base 3: mod_base = OTHER; note = Uracil
  modified_base 5: mod_base = OTHER; note = Uracil
  misc_feature join(1,3,5,7,9,11,13,15,17,19): note = RNA residue
  misc_feature join(2,4,6,8,10,12,14,16,18,20): note = DNA residue
tctttggtctaaaagtaaac

SEQ ID NO: 584 - DNA, 20 bp, synthetic construct
  misc_feature 1..20: note = Description of Artificial Sequence: Synthetic oligonucleotide
  misc_feature 1..20: note = Description of Combined DNA/RNA Molecule: Synthetic oligonucleotide
  source 1..20: mol_type = other DNA
  modified_base 5: mod_base = OTHER; note = Uracil
  modified_base 9: mod_base = OTHER; note = Uracil
  modified_base 11: mod_base = OTHER; note = Uracil
  modified_base 17: mod_base = OTHER; note = Uracil
  misc_feature join(1,3,5,7,9,11,13,15,17,19): note = RNA residue
  misc_feature join(2,4,6,8,10,12,14,16,18,20): note = DNA residue
atctttggtctaaaagtaaa

SEQ ID NO: 585 - DNA, 20 bp, synthetic construct
  misc_feature 1..20: note = Description of Artificial Sequence: Synthetic oligonucleotide
  misc_feature 1..20: note = Description of Combined DNA/RNA Molecule: Synthetic oligonucleotide
  source 1..20: mol_type = other DNA
  modified_base 3: mod_base = OTHER; note = Uracil
  modified_base 5: mod_base = OTHER; note = Uracil
  modified_base 7: mod_base = OTHER; note = Uracil
  misc_feature join(1,3,5,7,9,11,13,15,17,19): note = RNA residue
  misc_feature join(2,4,6,8,10,12,14,16,18,20): note = DNA residue
aatctttggtctaaaagtaa

SEQ ID NO: 586 - DNA, 20 bp, synthetic construct
  misc_feature 1..20: note = Description of Artificial Sequence: Synthetic oligonucleotide
  misc_feature 1..20: note = Description of Combined DNA/RNA Molecule: Synthetic oligonucleotide
  source 1..20: mol_type = other DNA
  modified_base 7: mod_base = OTHER; note = Uracil
  modified_base 11: mod_base = OTHER; note = Uracil
  modified_base 13: mod_base = OTHER; note = Uracil
  modified_base 19: mod_base = OTHER; note = Uracil
  misc_feature join(1,3,5,7,9,11,13,15,17,19): note = RNA residue
  misc_feature join(2,4,6,8,10,12,14,16,18,20): note = DNA residue
caatctttggtctaaaagta

SEQ ID NO: 587 - DNA, 20 bp, synthetic construct
  misc_feature 1..20: note = Description of Artificial Sequence: Synthetic oligonucleotide
  misc_feature 1..20: note = Description of Combined DNA/RNA Molecule: Synthetic oligonucleotide
  source 1..20: mol_type = other DNA
  modified_base 1: mod_base = OTHER; note = Uracil
  modified_base 3: mod_base = OTHER; note = Uracil
  modified_base 5: mod_base = OTHER; note = Uracil
  modified_base 17: mod_base = OTHER; note = Uracil
  modified_base 19: mod_base = OTHER; note = Uracil
  misc_feature join(1,3,5,7,9,11,13,15,17,19): note = RNA residue
  misc_feature join(2,4,6,8,10,12,14,16,18,20): note = DNA residue
tttctagaacccaatctttg

SEQ ID NO: 588 - DNA, 20 bp, synthetic construct
  misc_feature 1..20: note = Description of Artificial Sequence: Synthetic oligonucleotide
  misc_feature 1..20: note = Description of Combined DNA/RNA Molecule: Synthetic oligonucleotide
  source 1..20: mol_type = other DNA
  modified_base 3: mod_base = OTHER; note = Uracil
  modified_base 5: mod_base = OTHER; note = Uracil
  misc_feature join(1,3,5,7,9,11,13,15,17,19): note = RNA residue
  misc_feature join(2,4,6,8,10,12,14,16,18,20): note = DNA residue
cattttctagaacccaatct

SEQ ID NO: 589 - DNA, 20 bp, synthetic construct
  misc_feature 1..20: note = Description of Artificial Sequence: Synthetic oligonucleotide
  misc_feature 1..20: note = Description of Combined DNA/RNA Molecule: Synthetic oligonucleotide
  source 1..20: mol_type = other DNA
  modified_base 5: mod_base = OTHER; note = Uracil
  modified_base 7: mod_base = OTHER; note = Uracil
  modified_base 9: mod_base = OTHER; note = Uracil
  modified_base 19: mod_base = OTHER; note = Uracil
  misc_feature join(1,3,5,7,9,11,13,15,17,19): note = RNA residue
  misc_feature join(2,4,6,8,10,12,14,16,18,20): note = DNA residue
gcattttctagaacccaatc

SEQ ID NO: 590 - DNA, 20 bp, synthetic construct
  misc_feature 1..20: note = Description of Artificial Sequence: Synthetic oligonucleotide
  misc_feature 1..20: note = Description of Combined DNA/RNA Molecule: Synthetic oligonucleotide
  source 1..20: mol_type = other DNA
  modified_base 1: mod_base = OTHER; note = Uracil
  modified_base 5: mod_base = OTHER; note = Uracil
  modified_base 7: mod_base = OTHER; note = Uracil
  misc_feature join(1,3,5,7,9,11,13,15,17,19): note = RNA residue
  misc_feature join(2,4,6,8,10,12,14,16,18,20): note = DNA residue
tgcattttctagaacccaat

SEQ ID NO: 591 - DNA, 20 bp, synthetic construct
  misc_feature 1..20: note = Description of Artificial Sequence: Synthetic oligonucleotide
  misc_feature 1..20: note = Description of Combined DNA/RNA Molecule: Synthetic oligonucleotide
  source 1..20: mol_type = other DNA
  modified_base 7: mod_base = OTHER; note = Uracil
  modified_base 9: mod_base = OTHER; note = Uracil
  modified_base 11: mod_base = OTHER; note = Uracil
  misc_feature join(1,3,5,7,9,11,13,15,17,19): note = RNA residue
  misc_feature join(2,4,6,8,10,12,14,16,18,20): note = DNA residue
gtgcattttctagaacccaa

SEQ ID NO: 592 - DNA, 20 bp, synthetic construct
  misc_feature 1..20: note = Description of Artificial Sequence: Synthetic oligonucleotide
  misc_feature 1..20: note = Description of Combined DNA/RNA Molecule: Synthetic oligonucleotide
  source 1..20: mol_type = other DNA
  modified_base 3: mod_base = OTHER; note = Uracil
  modified_base 7: mod_base = OTHER; note = Uracil
  modified_base 9: mod_base = OTHER; note = Uracil
  misc_feature join(1,3,5,7,9,11,13,15,17,19): note = RNA residue
  misc_feature join(2,4,6,8,10,12,14,16,18,20): note = DNA residue
agtgcattttctagaaccca

SEQ ID NO: 593 - DNA, 20 bp, synthetic construct
  misc_feature 1..20: note = Description of Artificial Sequence: Synthetic oligonucleotide
  misc_feature 1..20: note = Description of Combined DNA/RNA Molecule: Synthetic oligonucleotide
  source 1..20: mol_type = other DNA
  modified_base 5: mod_base = OTHER; note = Uracil
  modified_base 9: mod_base = OTHER; note = Uracil
  modified_base 11: mod_base = OTHER; note = Uracil
  misc_feature join(1,3,5,7,9,11,13,15,17,19): note = RNA residue
  misc_feature join(2,4,6,8,10,12,14,16,18,20): note = DNA residue
caagtgcattttctagaacc

SEQ ID NO: 594 - DNA, 20 bp, synthetic construct
  misc_feature 1..20: note = Description of Artificial Sequence: Synthetic oligonucleotide
  misc_feature 1..20: note = Description of Combined DNA/RNA Molecule: Synthetic oligonucleotide
  source 1..20: mol_type = other DNA
  modified_base 11: mod_base = OTHER; note = Uracil
  modified_base 13: mod_base = OTHER; note = Uracil
  modified_base 15: mod_base = OTHER; note = Uracil
  misc_feature join(1,3,5,7,9,11,13,15,17,19): note = RNA residue
  misc_feature join(2,4,6,8,10,12,14,16,18,20): note = DNA residue
ccaagtgcattttctagaac

SEQ ID NO: 595 - DNA, 20 bp, synthetic construct
  misc_feature 1..20: note = Description of Artificial Sequence: Synthetic oligonucleotide
  misc_feature 1..20: note = Description of Combined DNA/RNA Molecule: Synthetic oligonucleotide
  source 1..20: mol_type = other DNA
  modified_base 7: mod_base = OTHER; note = Uracil
  modified_base 11: mod_base = OTHER; note = Uracil
  modified_base 13: mod_base = OTHER; note = Uracil
  misc_feature join(1,3,5,7,9,11,13,15,17,19): note = RNA residue
  misc_feature join(2,4,6,8,10,12,14,16,18,20): note = DNA residue
accaagtgcattttctagaa

SEQ ID NO: 596 - DNA, 20 bp, synthetic construct
  misc_feature 1..20: note = Description of Artificial Sequence: Synthetic oligonucleotide
  misc_feature 1..20: note = Description of Combined DNA/RNA Molecule: Synthetic oligonucleotide
  source 1..20: mol_type = other DNA
  modified_base 1: mod_base = OTHER; note = Uracil
  modified_base 13: mod_base = OTHER; note = Uracil
  modified_base 15: mod_base = OTHER; note = Uracil
  modified_base 17: mod_base = OTHER; note = Uracil
  misc_feature join(1,3,5,7,9,11,13,15,17,19): note = RNA residue
  misc_feature join(2,4,6,8,10,12,14,16,18,20): note = DNA residue
taccaagtgcattttctaga

SEQ ID NO: 597 - DNA, 20 bp, synthetic construct
  misc_feature 1..20: note = Description of Artificial Sequence: Synthetic oligonucleotide
  misc_feature 1..20: note = Description of Combined DNA/RNA Molecule: Synthetic oligonucleotide
  source 1..20: mol_type = other DNA
  modified_base 9: mod_base = OTHER; note = Uracil
  modified_base 13: mod_base = OTHER; note = Uracil
  modified_base 15: mod_base = OTHER; note = Uracil
  misc_feature join(1,3,5,7,9,11,13,15,17,19): note = RNA residue
  misc_feature join(2,4,6,8,10,12,14,16,18,20): note = DNA residue
ataccaagtgcattttctag

SEQ ID NO: 598 - DNA, 20 bp, synthetic construct
  misc_feature 1..20: note = Description of Artificial Sequence: Synthetic oligonucleotide
  misc_feature 1..20: note = Description of Combined DNA/RNA Molecule: Synthetic oligonucleotide
  source 1..20: mol_type = other DNA
  modified_base 1: mod_base = OTHER; note = Uracil
  modified_base 3: mod_base = OTHER; note = Uracil
  modified_base 15: mod_base = OTHER; note = Uracil
  modified_base 17: mod_base = OTHER; note = Uracil
  modified_base 19: mod_base = OTHER; note = Uracil
  misc_feature join(1,3,5,7,9,11,13,15,17,19): note = RNA residue
  misc_feature join(2,4,6,8,10,12,14,16,18,20): note = DNA residue
tataccaagtgcattttcta

SEQ ID NO: 599 - DNA, 20 bp, synthetic construct
  misc_feature 1..20: note = Description of Artificial Sequence: Synthetic oligonucleotide
  misc_feature 1..20: note = Description of Combined DNA/RNA Molecule: Synthetic oligonucleotide
  source 1..20: mol_type = other DNA
  modified_base 11: mod_base = OTHER; note = Uracil
  modified_base 15: mod_base = OTHER; note = Uracil
  modified_base 17: mod_base = OTHER; note = Uracil
  misc_feature join(1,3,5,7,9,11,13,15,17,19): note = RNA residue
  misc_feature join(2,4,6,8,10,12,14,16,18,20): note = DNA residue
gtataccaagtgcattttct

SEQ ID NO: 600 - DNA, 20 bp, synthetic construct
  misc_feature 1..20: note = Description of Artificial Sequence: Synthetic oligonucleotide
  misc_feature 1..20: note = Description of Combined DNA/RNA Molecule: Synthetic oligonucleotide
  source 1..20: mol_type = other DNA
  modified_base 3: mod_base = OTHER; note = Uracil
  modified_base 5: mod_base = OTHER; note = Uracil
  modified_base 17: mod_base = OTHER; note = Uracil
  modified_base 19: mod_base = OTHER; note = Uracil
  misc_feature join(1,3,5,7,9,11,13,15,17,19): note = RNA residue
  misc_feature join(2,4,6,8,10,12,14,16,18,20): note = DNA residue
agtataccaagtgcattttc

SEQ ID NO: 601 - DNA, 20 bp, synthetic construct
  misc_feature 1..20: note = Description of Artificial Sequence: Synthetic oligonucleotide
  misc_feature 1..20: note = Description of Combined DNA/RNA Molecule: Synthetic oligonucleotide
  source 1..20: mol_type = other DNA
  modified_base 1: mod_base = OTHER; note = Uracil
  modified_base 13: mod_base = OTHER; note = Uracil
  modified_base 17: mod_base = OTHER; note = Uracil
  modified_base 19: mod_base = OTHER; note = Uracil
  misc_feature join(1,3,5,7,9,11,13,15,17,19): note = RNA residue
  misc_feature join(2,4,6,8,10,12,14,16,18,20): note = DNA residue
tagtataccaagtgcatttt

SEQ ID NO: 602 - DNA, 20 bp, synthetic construct
  misc_feature 1..20: note = Description of Artificial Sequence: Synthetic oligonucleotide
  misc_feature 1..20: note = Description of Combined DNA/RNA Molecule: Synthetic oligonucleotide
  source 1..20: mol_type = other DNA
  modified_base 1: mod_base = OTHER; note = Uracil
  modified_base 5: mod_base = OTHER; note = Uracil
  modified_base 7: mod_base = OTHER; note = Uracil
  modified_base 19: mod_base = OTHER; note = Uracil
  misc_feature join(1,3,5,7,9,11,13,15,17,19): note = RNA residue
  misc_feature join(2,4,6,8,10,12,14,16,18,20): note = DNA residue
ttagtataccaagtgcattt

SEQ ID NO: 603 - DNA, 20 bp, synthetic construct
  misc_feature 1..20: note = Description of Artificial Sequence: Synthetic oligonucleotide
  misc_feature 1..20: note = Description of Combined DNA/RNA Molecule: Synthetic oligonucleotide
  source 1..20: mol_type = other DNA
  modified_base 3: mod_base = OTHER; note = Uracil
  modified_base 7: mod_base = OTHER; note = Uracil
  modified_base 9: mod_base = OTHER; note = Uracil
  misc_feature join(1,3,5,7,9,11,13,15,17,19): note = RNA residue
  misc_feature join(2,4,6,8,10,12,14,16,18,20): note = DNA residue
acttagtataccaagtgcat

SEQ ID NO: 604 - DNA, 20 bp, synthetic construct
  misc_feature 1..20: note = Description of Artificial Sequence: Synthetic oligonucleotide
  misc_feature 1..20: note = Description of Combined DNA/RNA Molecule: Synthetic oligonucleotide
  source 1..20: mol_type = other DNA
  modified_base 1: mod_base = OTHER; note = Uracil
  modified_base 5: mod_base = OTHER; note = Uracil
  modified_base 17: mod_base = OTHER; note = Uracil
  misc_feature join(1,3,5,7,9,11,13,15,17,19): note = RNA residue
  misc_feature join(2,4,6,8,10,12,14,16,18,20): note = DNA residue
tacttagtataccaagtgca

SEQ ID NO: 605 - DNA, 20 bp, synthetic construct
  misc_feature 1..20: note = Description of Artificial Sequence: Synthetic oligonucleotide
  misc_feature 1..20: note = Description of Combined DNA/RNA Molecule: Synthetic oligonucleotide
  source 1..20: mol_type = other DNA
  modified_base 5: mod_base = OTHER; note = Uracil
  modified_base 9: mod_base = OTHER; note = Uracil
  modified_base 11: mod_base = OTHER; note = Uracil
  misc_feature join(1,3,5,7,9,11,13,15,17,19): note = RNA residue
  misc_feature join(2,4,6,8,10,12,14,16,18,20): note = DNA residue
atacttagtataccaagtgc

SEQ ID NO: 606 - DNA, 20 bp, synthetic construct
  misc_feature 1..20: note = Description of Artificial Sequence: Synthetic oligonucleotide
  misc_feature 1..20: note = Description of Combined DNA/RNA Molecule: Synthetic oligonucleotide
  source 1..20: mol_type = other DNA
  modified_base 3: mod_base = OTHER; note = Uracil
  modified_base 7: mod_base = OTHER; note = Uracil
  modified_base 19: mod_base = OTHER; note = Uracil
  misc_feature join(1,3,5,7,9,11,13,15,17,19): note = RNA residue
  misc_feature join(2,4,6,8,10,12,14,16,18,20): note = DNA residue
aatacttagtataccaagtg

SEQ ID NO: 607 - DNA, 20 bp, synthetic construct
  misc_feature 1..20: note = Description of Artificial Sequence: Synthetic oligonucleotide
  misc_feature 1..20: note = Description of Combined DNA/RNA Molecule: Synthetic oligonucleotide
  source 1..20: mol_type = other DNA
  modified_base 3: mod_base = OTHER; note = Uracil
  modified_base 5: mod_base = OTHER; note = Uracil
  modified_base 11: mod_base = OTHER; note = Uracil
  modified_base 15: mod_base = OTHER; note = Uracil
  modified_base 17: mod_base = OTHER; note = Uracil
  misc_feature join(1,3,5,7,9,11,13,15,17,19): note = RNA residue
  misc_feature join(2,4,6,8,10,12,14,16,18,20): note = DNA residue
gttttaatacttagtatacc

SEQ ID NO: 608 - DNA, 20 bp, synthetic construct
  misc_feature 1..20: note = Description of Artificial Sequence: Synthetic oligonucleotide
  misc_feature 1..20: note = Description of Combined DNA/RNA Molecule: Synthetic oligonucleotide
  source 1..20: mol_type = other DNA
  modified_base 3: mod_base = OTHER; note = Uracil
  modified_base 5: mod_base = OTHER; note = Uracil
  modified_base 13: mod_base = OTHER; note = Uracil
  misc_feature join(1,3,5,7,9,11,13,15,17,19): note = RNA residue
  misc_feature join(2,4,6,8,10,12,14,16,18,20): note = DNA residue
agtgttgccaactgaaacaa

SEQ ID NO: 609 - DNA, 20 bp, synthetic construct
  misc_feature 1..20: note = Description of Artificial Sequence: Synthetic oligonucleotide
  misc_feature 1..20: note = Description of Combined DNA/RNA Molecule: Synthetic oligonucleotide
  source 1..20: mol_type = other DNA
  modified_base 5: mod_base = OTHER; note = Uracil
  modified_base 9: mod_base = OTHER; note = Uracil
  modified_base 19: mod_base = OTHER; note = Uracil
  misc_feature join(1,3,5,7,9,11,13,15,17,19): note = RNA residue
  misc_feature join(2,4,6,8,10,12,14,16,18,20): note = DNA residue
caattgaatgggcagtgttg

SEQ ID NO: 610 - DNA, 20 bp, synthetic construct
  misc_feature 1..20: note = Description of Artificial Sequence: Synthetic oligonucleotide
  misc_feature 1..20: note = Description of Combined DNA/RNA Molecule: Synthetic oligonucleotide
  source 1..20: mol_type = other DNA
  modified_base 1: mod_base = OTHER; note = Uracil
  modified_base 5: mod_base = OTHER; note = Uracil
  modified_base 17: mod_base = OTHER; note = Uracil
  modified_base 19: mod_base = OTHER; note = Uracil
  misc_feature join(1,3,5,7,9,11,13,15,17,19): note = RNA residue
  misc_feature join(2,4,6,8,10,12,14,16,18,20): note = DNA residue
tcaattgaatgggcagtgtt

SEQ ID NO: 611 - DNA, 20 bp, synthetic construct
  misc_feature 1..20: note = Description of Artificial Sequence: Synthetic oligonucleotide
  misc_feature 1..20: note = Description of Combined DNA/RNA Molecule: Synthetic oligonucleotide
  source 1..20: mol_type = other DNA
  modified_base 1: mod_base = OTHER; note = Uracil
  modified_base 7: mod_base = OTHER; note = Uracil
  modified_base 11: mod_base = OTHER; note = Uracil
  misc_feature join(1,3,5,7,9,11,13,15,17,19): note = RNA residue
  misc_feature join(2,4,6,8,10,12,14,16,18,20): note = DNA residue
ttcaattgaatgggcagtgt

SEQ ID NO: 612 - DNA, 20 bp, synthetic construct
  misc_feature 1..20: note = Description of Artificial Sequence: Synthetic oligonucleotide
  misc_feature 1..20: note = Description of Combined DNA/RNA Molecule: Synthetic oligonucleotide
  source 1..20: mol_type = other DNA
  modified_base 1: mod_base = OTHER; note = Uracil
  modified_base 13: mod_base = OTHER; note = Uracil
  modified_base 17: mod_base = OTHER; note = Uracil
  modified_base 19: mod_base = OTHER; note = Uracil
  misc_feature join(1,3,5,7,9,11,13,15,17,19): note = RNA residue
  misc_feature join(2,4,6,8,10,12,14,16,18,20): note = DNA residue
tgaaggcaatcgttaatttt

SEQ ID NO: 613 - DNA, 20 bp, synthetic construct
  misc_feature 1..20: note = Description of Artificial Sequence: Synthetic oligonucleotide
  misc_feature 1..20: note = Description of Combined DNA/RNA Molecule: Synthetic oligonucleotide
  source 1..20: mol_type = other DNA
  modified_base 11: mod_base = OTHER; note = Uracil
  modified_base 15: mod_base = OTHER; note = Uracil
  modified_base 19: mod_base = OTHER; note = Uracil
  misc_feature join(1,3,5,7,9,11,13,15,17,19): note = RNA residue
  misc_feature join(2,4,6,8,10,12,14,16,18,20): note = DNA residue
ctgaaggcaatcgttaattt

SEQ ID NO: 614 - DNA, 20 bp, synthetic construct
  misc_feature 1..20: note = Description of Artificial Sequence: Synthetic oligonucleotide
  misc_feature 1..20: note = Description of Combined DNA/RNA Molecule: Synthetic oligonucleotide
  source 1..20: mol_type = other DNA
  modified_base 3: mod_base = OTHER; note = Uracil
  modified_base 15: mod_base = OTHER; note = Uracil
  modified_base 19: mod_base = OTHER; note = Uracil
  misc_feature join(1,3,5,7,9,11,13,15,17,19): note = RNA residue
  misc_feature join(2,4,6,8,10,12,14,16,18,20): note = DNA residue
actgaaggcaatcgttaatt

SEQ ID NO: 615 - DNA, 20 bp, synthetic construct
  misc_feature 1..20: note = Description of Artificial Sequence: Synthetic oligonucleotide
  misc_feature 1..20: note = Description of Combined DNA/RNA Molecule: Synthetic oligonucleotide
  source 1..20: mol_type = other DNA
  modified_base 13: mod_base = OTHER; note = Uracil
  modified_base 17: mod_base = OTHER; note = Uracil
  misc_feature join(1,3,5,7,9,11,13,15,17,19): note = RNA residue
  misc_feature join(2,4,6,8,10,12,14,16,18,20): note = DNA residue
aactgaaggcaatcgttaat

SEQ ID NO: 616 - DNA, 20 bp, synthetic construct
  misc_feature 1..20: note = Description of Artificial Sequence: Synthetic oligonucleotide
  misc_feature 1..20: note = Description of Combined DNA/RNA Molecule: Synthetic oligonucleotide
  source 1..20: mol_type = other DNA
  modified_base 5: mod_base = OTHER; note = Uracil
  modified_base 17: mod_base = OTHER; note = Uracil
  misc_feature join(1,3,5,7,9,11,13,15,17,19): note = RNA residue
  misc_feature join(2,4,6,8,10,12,14,16,18,20): note = DNA residue
aaactgaaggcaatcgttaa

SEQ ID NO: 617 - DNA, 20 bp, synthetic construct
  misc_feature 1..20: note = Description of Artificial Sequence: Synthetic oligonucleotide
  misc_feature 1..20: note = Description of Combined DNA/RNA Molecule: Synthetic oligonucleotide
  source 1..20: mol_type = other DNA
  modified_base 15: mod_base = OTHER; note = Uracil
  modified_base 19: mod_base = OTHER; note = Uracil
  misc_feature join(1,3,5,7,9,11,13,15,17,19): note = RNA residue
  misc_feature join(2,4,6,8,10,12,14,16,18,20): note = DNA residue
caaactgaaggcaatcgtta

SEQ ID NO: 618 - DNA, 20 bp, synthetic construct
  misc_feature 1..20: note = Description of Artificial Sequence: Synthetic oligonucleotide
  misc_feature 1..20: note = Description of Combined DNA/RNA Molecule: Synthetic oligonucleotide
  source 1..20: mol_type = other DNA
  modified_base 7: mod_base = OTHER; note = Uracil
  modified_base 19: mod_base = OTHER; note = Uracil
  misc_feature join(1,3,5,7,9,11,13,15,17,19): note = RNA residue
  misc_feature join(2,4,6,8,10,12,14,16,18,20): note = DNA residue
acaaactgaaggcaatcgtt

SEQ ID NO: 619 - DNA, 20 bp, synthetic construct
  misc_feature 1..20: note = Description of Artificial Sequence: Synthetic oligonucleotide
  misc_feature 1..20: note = Description of Combined DNA/RNA Molecule: Synthetic oligonucleotide
  source 1..20: mol_type = other DNA
  modified_base 9: mod_base = OTHER; note = Uracil
  misc_feature join(1,3,5,7,9,11,13,15,17,19): note = RNA residue
  misc_feature join(2,4,6,8,10,12,14,16,18,20): note = DNA residue
acacaaactgaaggcaatcg

SEQ ID NO: 620 - DNA, 20 bp, synthetic construct
  misc_feature 1..20: note = Description of Artificial Sequence: Synthetic oligonucleotide
  source 1..20: mol_type = other DNA
  misc_feature join(1,3,5,7,9,11,13,15,17,19): note = RNA residue
  misc_feature join(2,4,6,8,10,12,14,16,18,20): note = DNA residue
gtgaccacatacatcaaaat

SEQ ID NO: 621 - DNA, 20 bp, synthetic construct
  misc_feature 1..20: note = Description of Artificial Sequence: Synthetic oligonucleotide
  misc_feature 1..20: note = Description of Combined DNA/RNA Molecule: Synthetic oligonucleotide
  source 1..20: mol_type = other DNA
  modified_base 1: mod_base = OTHER; note = Uracil
  modified_base 5: mod_base = OTHER; note = Uracil
  modified_base 13: mod_base = OTHER; note = Uracil
  modified_base 17: mod_base = OTHER; note = Uracil
  misc_feature join(1,3,5,7,9,11,13,15,17,19): note = RNA residue
  misc_feature join(2,4,6,8,10,12,14,16,18,20): note = DNA residue
ttagtgaccacatacatcaa

SEQ ID NO: 622 - DNA, 20 bp, synthetic construct
  misc_feature 1..20: note = Description of Artificial Sequence: Synthetic oligonucleotide
  misc_feature 1..20: note = Description of Combined DNA/RNA Molecule: Synthetic oligonucleotide
  source 1..20: mol_type = other DNA
  modified_base 1: mod_base = OTHER; note = Uracil
  modified_base 3: mod_base = OTHER; note = Uracil
  modified_base 7: mod_base = OTHER; note = Uracil
  modified_base 9: mod_base = OTHER; note = Uracil
  modified_base 13: mod_base = OTHER; note = Uracil
  misc_feature join(1,3,5,7,9,11,13,15,17,19): note = RNA residue
  misc_feature join(2,4,6,8,10,12,14,16,18,20): note = DNA residue
tttacctataagtacaatag

SEQ ID NO: 623 - DNA, 20 bp, synthetic construct
  misc_feature 1..20: note = Description of Artificial Sequence: Synthetic oligonucleotide
  misc_feature 1..20: note = Description of Combined DNA/RNA Molecule: Synthetic oligonucleotide
  source 1..20: mol_type = other DNA
  modified_base 3: mod_base = OTHER; note = Uracil
  modified_base 19: mod_base = OTHER; note = Uracil
  misc_feature join(1,3,5,7,9,11,13,15,17,19): note = RNA residue
  misc_feature join(2,4,6,8,10,12,14,16,18,20): note = DNA residue
gtttacctataagtacaata

SEQ ID NO: 624 - DNA, 20 bp, synthetic construct
  misc_feature 1..20: note = Description of Artificial Sequence: Synthetic oligonucleotide
  misc_feature 1..20: note = Description of Combined DNA/RNA Molecule: Synthetic oligonucleotide
  source 1..20: mol_type = other DNA
  modified_base 3: mod_base = OTHER; note = Uracil
  modified_base 5: mod_base = OTHER; note = Uracil
  modified_base 9: mod_base = OTHER; note = Uracil
  modified_base 11: mod_base = OTHER; note = Uracil
  modified_base 15: mod_base = OTHER; note = Uracil
  misc_feature join(1,3,5,7,9,11,13,15,17,19): note = RNA residue
  misc_feature join(2,4,6,8,10,12,14,16,18,20): note = DNA residue
ggtttacctataagtacaat

SEQ ID NO: 625 - DNA, 20 bp, synthetic construct
  misc_feature 1..20: note = Description of Artificial Sequence: Synthetic oligonucleotide
  misc_feature 1..20: note = Description of Combined DNA/RNA Molecule: Synthetic oligonucleotide
  source 1..20: mol_type = other DNA
  modified_base 7: mod_base = OTHER; note = Uracil
  modified_base 15: mod_base = OTHER; note = Uracil
  modified_base 17: mod_base = OTHER; note = Uracil
  misc_feature join(1,3,5,7,9,11,13,15,17,19): note = RNA residue
  misc_feature join(2,4,6,8,10,12,14,16,18,20): note = DNA residue
acatatttgcaaggtttacc

SEQ ID NO: 626 - DNA, 20 bp, synthetic construct
  misc_feature 1..20: note = Description of Artificial Sequence: Synthetic oligonucleotide
  misc_feature 1..20: note = Description of Combined DNA/RNA Molecule: Synthetic oligonucleotide
  source 1..20: mol_type = other DNA
  modified_base 1: mod_base = OTHER; note = Uracil
  modified_base 5: mod_base = OTHER; note = Uracil
  modified_base 7: mod_base = OTHER; note = Uracil
  modified_base 9: mod_base = OTHER; note = Uracil
  modified_base 17: mod_base = OTHER; note = Uracil
  misc_feature join(1,3,5,7,9,11,13,15,17,19): note = RNA residue
  misc_feature join(2,4,6,8,10,12,14,16,18,20): note = DNA residue
tacatatttgcaaggtttac

SEQ ID NO: 627 - DNA, 20 bp, synthetic construct
  misc_feature 1..20: note = Description of Artificial Sequence: Synthetic oligonucleotide
  misc_feature 1..20: note = Description of Combined DNA/RNA Molecule: Synthetic oligonucleotide
  source 1..20: mol_type = other DNA
  modified_base 1: mod_base = OTHER; note = Uracil
  modified_base 9: mod_base = OTHER; note = Uracil
  modified_base 17: mod_base = OTHER; note = Uracil
  modified_base 19: mod_base = OTHER; note = Uracil
  misc_feature join(1,3,5,7,9,11,13,15,17,19): note = RNA residue
  misc_feature join(2,4,6,8,10,12,14,16,18,20): note = DNA residue
ttacatatttgcaaggttta

SEQ ID NO: 628 - DNA, 20 bp, synthetic construct
  misc_feature 1..20: note = Description of Artificial Sequence: Synthetic oligonucleotide
  misc_feature 1..20: note = Description of Combined DNA/RNA Molecule: Synthetic oligonucleotide
  source 1..20: mol_type = other DNA
  modified_base 3: mod_base = OTHER; note = Uracil
  modified_base 7: mod_base = OTHER; note = Uracil
  modified_base 9: mod_base = OTHER; note = Uracil
  modified_base 11: mod_base = OTHER; note = Uracil
  modified_base 19: mod_base = OTHER; note = Uracil
  misc_feature join(1,3,5,7,9,11,13,15,17,19): note = RNA residue
  misc_feature join(2,4,6,8,10,12,14,16,18,20): note = DNA residue
gttacatatttgcaaggttt

SEQ ID NO: 629 - DNA, 20 bp, synthetic construct
  misc_feature 1..20: note = Description of Artificial Sequence: Synthetic oligonucleotide
  misc_feature 1..20: note = Description of Combined DNA/RNA Molecule: Synthetic oligonucleotide
  source 1..20: mol_type = other DNA
  modified_base 3: mod_base = OTHER; note = Uracil
  modified_base 11: mod_base = OTHER; note = Uracil
  modified_base 19: mod_base = OTHER; note = Uracil
  misc_feature join(1,3,5,7,9,11,13,15,17,19): note = RNA residue
  misc_feature join(2,4,6,8,10,12,14,16,18,20): note = DNA residue
ggttacatatttgcaaggtt

SEQ ID NO: 630 - DNA, 20 bp, synthetic construct
  misc_feature 1..20: note = Description of Artificial Sequence: Synthetic oligonucleotide
  misc_feature 1..20: note = Description of Combined DNA/RNA Molecule: Synthetic oligonucleotide
  source 1..20: mol_type = other DNA
  modified_base 5: mod_base = OTHER; note = Uracil
  modified_base 9: mod_base = OTHER; note = Uracil
  modified_base 11: mod_base = OTHER; note = Uracil
  modified_base 13: mod_base = OTHER; note = Uracil
  misc_feature join(1,3,5,7,9,11,13,15,17,19): note = RNA residue
  misc_feature join(2,4,6,8,10,12,14,16,18,20): note = DNA residue
aggttacatatttgcaaggt

SEQ ID NO: 631 - DNA, 20 bp, synthetic construct
  misc_feature 1..20: note = Description of Artificial Sequence: Synthetic oligonucleotide
  misc_feature 1..20: note = Description of Combined DNA/RNA Molecule: Synthetic oligonucleotide
  source 1..20: mol_type = other DNA
  modified_base 5: mod_base = OTHER; note = Uracil
  modified_base 13: mod_base = OTHER; note = Uracil
  misc_feature join(1,3,5,7,9,11,13,15,17,19): note = RNA residue
  misc_feature join(2,4,6,8,10,12,14,16,18,20): note = DNA residue
caggttacatatttgcaagg

SEQ ID NO: 632 - DNA, 20 bp, synthetic construct
  misc_feature 1..20: note = Description of Artificial Sequence: Synthetic oligonucleotide
  misc_feature 1..20: note = Description of Combined DNA/RNA Molecule: Synthetic oligonucleotide
  source 1..20: mol_type = other DNA
  modified_base 7: mod_base = OTHER; note = Uracil
  modified_base 11: mod_base = OTHER; note = Uracil
  modified_base 13: mod_base = OTHER; note = Uracil
  modified_base 15: mod_base = OTHER; note = Uracil
  misc_feature join(1,3,5,7,9,11,13,15,17,19): note = RNA residue
  misc_feature join(2,4,6,8,10,12,14,16,18,20): note = DNA residue
acaggttacatatttgcaag

SEQ ID NO: 633 - DNA, 20 bp, synthetic construct
  misc_feature 1..20: note = Description of Artificial Sequence: Synthetic oligonucleotide
  misc_feature 1..20: note = Description of Combined DNA/RNA Molecule: Synthetic oligonucleotide
  source 1..20: mol_type = other DNA
  modified_base 9: mod_base = OTHER; note = Uracil
  modified_base 13: mod_base = OTHER; note = Uracil
  modified_base 15: mod_base = OTHER; note = Uracil
  modified_base 17: mod_base = OTHER; note = Uracil
  misc_feature join(1,3,5,7,9,11,13,15,17,19): note = RNA residue
  misc_feature join(2,4,6,8,10,12,14,16,18,20): note = DNA residue
acacaggttacatatttgca

SEQ ID NO: 634 - DNA, 20 bp, synthetic construct
  misc_feature 1..20: note = Description of Artificial Sequence: Synthetic oligonucleotide
  misc_feature 1..20: note = Description of Combined DNA/RNA Molecule: Synthetic oligonucleotide
  source 1..20: mol_type = other DNA
  modified_base 9: mod_base = OTHER; note = Uracil
  modified_base 17: mod_base = OTHER; note = Uracil
  misc_feature join(1,3,5,7,9,11,13,15,17,19): note = RNA residue
  misc_feature join(2,4,6,8,10,12,14,16,18,20): note = DNA residue
aacacaggttacatatttgc

SEQ ID NO: 635 - DNA, 20 bp, synthetic construct
  misc_feature 1..19: note = Description of Artificial Sequence: Synthetic oligonucleotide
  misc_feature 1..19: note = Description of Combined DNA/RNA Molecule: Synthetic oligonucleotide
  source 1..20: mol_type = other DNA
  modified_base 11: mod_base = OTHER; note = Uracil
  modified_base 19: mod_base = OTHER; note = Uracil
  misc_feature join(1,3,5,7,9,11,13,15,17,19): note = RNA residue
  misc_feature join(2,4,6,8,10,12,14,16,18,20): note = DNA residue
gcaacacaggttacatattt

SEQ ID NO: 636 - DNA, 20 bp, synthetic construct
  misc_feature 1..20: note = Description of Artificial Sequence: Synthetic oligonucleotide
  misc_feature 1..20: note = Description of Combined DNA/RNA Molecule: Synthetic oligonucleotide
  source 1..20: mol_type = other DNA
  modified_base 13: mod_base = OTHER; note = Uracil
  misc_feature join(1,3,5,7,9,11,13,15,17,19): note = RNA residue
  misc_feature join(2,4,6,8,10,12,14,16,18,20): note = DNA residue
gcgcaacacaggttacatat

SEQ ID NO: 637 - DNA, 20 bp, synthetic construct
  misc_feature 1..20: note = Description of Artificial Sequence: Synthetic oligonucleotide
  misc_feature 1..20: note = Description of Combined DNA/RNA Molecule: Synthetic oligonucleotide
  source 1..20: mol_type = other DNA
  modified_base 1: mod_base = OTHER; note = Uracil
  modified_base 15: mod_base = OTHER; note = Uracil
  modified_base 19: mod_base = OTHER; note = Uracil
  misc_feature join(1,3,5,7,9,11,13,15,17,19): note = RNA residue
  misc_feature join(2,4,6,8,10,12,14,16,18,20): note = DNA residue
tgcgcaacacaggttacata

SEQ ID NO: 638 - DNA, 20 bp, synthetic construct
  misc_feature 1..20: note = Description of Artificial Sequence: Synthetic oligonucleotide
  misc_feature 1..20: note = Description of Combined DNA/RNA Molecule: Synthetic oligonucleotide
  source 1..20: mol_type = other DNA
  modified_base 1: mod_base = OTHER; note = Uracil
  modified_base 15: mod_base = OTHER; note = Uracil
  misc_feature join(1,3,5,7,9,11,13,15,17,19): note = RNA residue
  misc_feature join(2,4,6,8,10,12,14,16,18,20): note = DNA residue
ttgcgcaacacaggttacat

SEQ ID NO: 639 - DNA, 20 bp, synthetic construct
  misc_feature 1..20: note = Description of Artificial Sequence: Synthetic oligonucleotide
  misc_feature 1..20: note = Description of Combined DNA/RNA Molecule: Synthetic oligonucleotide
  source 1..20: mol_type = other DNA
  modified_base 1: mod_base = OTHER; note = Uracil
  modified_base 3: mod_base = OTHER; note = Uracil
  modified_base 17: mod_base = OTHER; note = Uracil
  misc_feature join(1,3,5,7,9,11,13,15,17,19): note = RNA residue
  misc_feature join(2,4,6,8,10,12,14,16,18,20): note = DNA residue
tttgcgcaacacaggttaca

SEQ ID NO: 640 - DNA, 20 bp, synthetic construct
  misc_feature 1..20: note = Description of Artificial Sequence: Synthetic oligonucleotide
  misc_feature 1..20: note = Description of Combined DNA/RNA Molecule: Synthetic oligonucleotide
  source 1..20: mol_type = other DNA
  modified_base 3: mod_base = OTHER; note = Uracil
  modified_base 5: mod_base = OTHER; note = Uracil
  modified_base 19: mod_base = OTHER; note = Uracil
  misc_feature join(1,3,5,7,9,11,13,15,17,19): note = RNA residue
  misc_feature join(2,4,6,8,10,12,14,16,18,20): note = DNA residue
catttgcgcaacacaggtta

SEQ ID NO: 641 - DNA, 20 bp, synthetic construct
  misc_feature 1..20: note = Description of Artificial Sequence: Synthetic oligonucleotide
  misc_feature 1..20: note = Description of Combined DNA/RNA Molecule: Synthetic oligonucleotide
  source 1..20: mol_type = other DNA
  modified_base 9: mod_base = OTHER; note = Uracil
  modified_base 19: mod_base = OTHER; note = Uracil
  modified_base 3: mod_base = OTHER; note = Uracil
  misc_feature join(1,3,5,7,9,11,13,15,17,19): note = RNA residue
  misc_feature join(2,4,6,8,10,12,14,16,18,20): note = DNA residue
actcaaatttatgcggcatt

SEQ ID NO: 642 - DNA, 20 bp, synthetic construct
  misc_feature 1..20: note = Description of Artificial Sequence: Synthetic oligonucleotide
  misc_feature 1..20: note = Description of Combined DNA/RNA Molecule: Synthetic oligonucleotide
  source 1..20: mol_type = other DNA
  modified_base 11: mod_base = OTHER; note = Uracil
  modified_base 13: mod_base = OTHER; note = Uracil
  modified_base 15: mod_base = OTHER; note = Uracil
  misc_feature join(1,3,5,7,9,11,13,15,17,19): note = RNA residue
  misc_feature join(2,4,6,8,10,12,14,16,18,20): note = DNA residue
atcactcaaatttatgcggc

SEQ ID NO: 643 - DNA, 20 bp, synthetic construct
  misc_feature 1..20: note = Description of Artificial Sequence: Synthetic oligonucleotide
  misc_feature 1..20: note = Description of Combined DNA/RNA Molecule: Synthetic oligonucleotide
  source 1..20: mol_type = other DNA
  modified_base 5: mod_base = OTHER; note = Uracil
  modified_base 11: mod_base = OTHER; note = Uracil
  modified_base 15: mod_base = OTHER; note = Uracil
  misc_feature join(1,3,5,7,9,11,13,15,17,19): note = RNA residue
  misc_feature join(2,4,6,8,10,12,14,16,18,20): note = DNA residue
acattaacaatcactcaaat

SEQ ID NO: 644 - DNA, 20 bp, synthetic construct
  misc_feature 1..20: note = Description of Artificial Sequence: Synthetic oligonucleotide
  misc_feature 1..20: note = Description of Combined DNA/RNA Molecule: Synthetic oligonucleotide
  source 1..20: mol_type = other DNA
  modified_base 7: mod_base = OTHER; note = Uracil
  modified_base 13: mod_base = OTHER; note = Uracil
  modified_base 17: mod_base = OTHER; note = Uracil
  misc_feature join(1,3,5,7,9,11,13,15,17,19): note = RNA residue
  misc_feature join(2,4,6,8,10,12,14,16,18,20): note = DNA residue
caacattaacaatcactcaa

SEQ ID NO: 645 - DNA, 20 bp, synthetic construct
  misc_feature 1..20: note = Description of Artificial Sequence: Synthetic oligonucleotide
  misc_feature 1..20: note = Description of Combined DNA/RNA Molecule: Synthetic oligonucleotide
  source 1..20: mol_type = other DNA
  modified_base 7: mod_base = OTHER; note = Uracil
  misc_feature join(1,3,5,7,9,11,13,15,17,19): note = RNA residue
  misc_feature join(2,4,6,8,10,12,14,16,18,20): note = DNA residue
acaacattaacaatcactca

SEQ ID NO: 646 - DNA, 20 bp, synthetic construct
  misc_feature 1..20: note = Description of Artificial Sequence: Synthetic oligonucleotide
  misc_feature 1..20: note = Description of Combined DNA/RNA Molecule: Synthetic oligonucleotide
  source 1..20: mol_type = other DNA
  modified_base 9: mod_base = OTHER; note = Uracil
  modified_base 19: mod_base = OTHER; note = Uracil
  modified_base 15: mod_base = OTHER; note = Uracil
  misc_feature join(1,3,5,7,9,11,13,15,17,19): note = RNA residue
  misc_feature join(2,4,6,8,10,12,14,16,18,20): note = DNA residue
gacaacattaacaatcactc

SEQ ID NO: 647 - DNA, 20 bp, synthetic construct
  misc_feature 1..20: note = Description of Artificial Sequence: Synthetic oligonucleotide
  misc_feature 1..20: note = Description of Combined DNA/RNA Molecule: Synthetic oligonucleotide
  source 1..20: mol_type = other DNA
  modified_base 9: mod_base = OTHER; note = Uracil
  misc_feature join(1,3,5,7,9,11,13,15,17,19): note = RNA residue
  misc_feature join(2,4,6,8,10,12,14,16,18,20): note = DNA residue
agacaacattaacaatcact

SEQ ID NO: 648 - DNA, 20 bp, synthetic construct
  misc_feature 1..20: note = Description of Artificial Sequence: Synthetic oligonucleotide
  source 1..20: mol_type = other DNA
  misc_feature join(1,3,5,7,9,11,13,15,17,19): note = RNA residue
  misc_feature join(2,4,6,8,10,12,14,16,18,20): note = DNA residue
accacagtatcacaatcaag

SEQ ID NO: 649 - DNA, 20 bp, synthetic construct
  misc_feature 1..20: note = Description of Artificial Sequence: Synthetic oligonucleotide
  misc_feature 1..20: note = Description of Combined DNA/RNA Molecule: Synthetic oligonucleotide
  source 1..20: mol_type = other DNA
  modified_base 9: mod_base = OTHER; note = Uracil
  modified_base 11: mod_base = OTHER; note = Uracil
  modified_base 17: mod_base = OTHER; note = Uracil
  misc_feature join(1,3,5,7,9,11,13,15,17,19): note = RNA residue
  misc_feature join(2,4,6,8,10,12,14,16,18,20): note = DNA residue
gaccacagtatcacaatcaa

SEQ ID NO: 650 - DNA, 20 bp, synthetic construct
  misc_feature 1..20: note = Description of Artificial Sequence: Synthetic oligonucleotide
  misc_feature 1..20: note = Description of Combined DNA/RNA Molecule: Synthetic oligonucleotide
  source 1..20: mol_type = other DNA
  modified_base 1: mod_base = OTHER; note = Uracil
  misc_feature join(1,3,5,7,9,11,13,15,17,19): note = RNA residue
  misc_feature join(2,4,6,8,10,12,14,16,18,20): note = DNA residue
tgaccacagtatcacaatca

SEQ ID NO: 651 - DNA, 20 bp, synthetic construct
  misc_feature 1..20: note = Description of Artificial Sequence: Synthetic oligonucleotide
  misc_feature 1..20: note = Description of Combined DNA/RNA Molecule: Synthetic oligonucleotide
  source 1..20: mol_type = other DNA
  modified_base 11: mod_base = OTHER; note = Uracil
  modified_base 13: mod_base = OTHER; note = Uracil
  modified_base 19: mod_base = OTHER; note = Uracil
  misc_feature join(1,3,5,7,9,11,13,15,17,19): note = RNA residue
  misc_feature join(2,4,6,8,10,12,14,16,18,20): note = DNA residue
atgaccacagtatcacaatc

SEQ ID NO: 652 - DNA, 20 bp, synthetic construct
  misc_feature 1..20: note = Description of Artificial Sequence: Synthetic oligonucleotide
  misc_feature 1..20: note = Description of Combined DNA/RNA Molecule: Synthetic oligonucleotide
  source 1..20: mol_type = other DNA
  modified_base 3: mod_base = OTHER; note = Uracil
  modified_base 5: mod_base = OTHER; note = Uracil
  misc_feature join(1,3,5,7,9,11,13,15,17,19): note = RNA residue
  misc_feature join(2,4,6,8,10,12,14,16,18,20): note = DNA residue
catatgaccacagtatcaca

SEQ ID NO: 653 - DNA, 20 bp, synthetic construct
  misc_feature 1..20: note = Description of Artificial Sequence: Synthetic oligonucleotide
  misc_feature 1..20: note = Description of Combined DNA/RNA Molecule: Synthetic oligonucleotide
  source 1..20: mol_type = other DNA
  modified_base 15: mod_base = OTHER; note = Uracil
  modified_base 17: mod_base = OTHER; note = Uracil
  misc_feature join(1,3,5,7,9,11,13,15,17,19): note = RNA residue
  misc_feature join(2,4,6,8,10,12,14,16,18,20): note = DNA residue
gcatatgaccacagtatcac

SEQ ID NO: 654 - DNA, 20 bp, synthetic construct
  misc_feature 1..20: note = Description of Artificial Sequence: Synthetic oligonucleotide
  misc_feature 1..20: note = Description of Combined DNA/RNA Molecule: Synthetic oligonucleotide
  source 1..20: mol_type = other DNA
  modified_base 15: mod_base = OTHER; note = Uracil
  modified_base 17: mod_base = OTHER; note = Uracil
  misc_feature join(1,3,5,7,9,11,13,15,17,19): note = RNA residue
  misc_feature join(2,4,6,8,10,12,14,16,18,20): note = DNA residue
gacaaacacgggcatatgac

SEQ ID NO: 655 - DNA, 20 bp, synthetic construct
  misc_feature 1..20: note = Description of Artificial Sequence: Synthetic oligonucleotide
  misc_feature 1..20: note = Description of Combined DNA/RNA Molecule: Synthetic oligonucleotide
  source 1..20: mol_type = other DNA
  modified_base 1: mod_base = OTHER; note = Uracil
  misc_feature join(1,3,5,7,9,11,13,15,17,19): note = RNA residue
  misc_feature join(2,4,6,8,10,12,14,16,18,20): note = DNA residue
tgacaaacacgggcatatga

SEQ ID NO: 656 - DNA, 20 bp, synthetic construct
  misc_feature 1..20: note = Description of Artificial Sequence: Synthetic oligonucleotide
  misc_feature 1..20: note = Description of Combined DNA/RNA Molecule: Synthetic oligonucleotide
  source 1..20: mol_type = other DNA
  modified_base 3: mod_base = OTHER; note = Uracil
  modified_base 9: mod_base = OTHER; note = Uracil
  modified_base 15: mod_base = OTHER; note = Uracil
  modified_base 17: mod_base = OTHER; note = Uracil
  modified_base 19: mod_base = OTHER; note = Uracil
  misc_feature join(1,3,5,7,9,11,13,15,17,19): note = RNA residue
  misc_feature join(2,4,6,8,10,12,14,16,18,20): note = DNA residue
gttcatagtaaacatttttg

SEQ ID NO: 657 - DNA, 20 bp, synthetic construct
  misc_feature 1..20: note = Description of Artificial Sequence: Synthetic oligonucleotide
  misc_feature 1..20: note = Description of Combined DNA/RNA Molecule: Synthetic oligonucleotide
  source 1..20: mol_type = other DNA
  modified_base 5: mod_base = OTHER; note = Uracil
  modified_base 11: mod_base = OTHER; note = Uracil
  modified_base 17: mod_base = OTHER; note = Uracil
  modified_base 19: mod_base = OTHER; note = Uracil
  misc_feature join(1,3,5,7,9,11,13,15,17,19): note = RNA residue
  misc_feature join(2,4,6,8,10,12,14,16,18,20): note = DNA residue
gtgttcatagtaaacatttt

SEQ ID NO: 658 - DNA, 20 bp, synthetic construct
  misc_feature 1..20: note = Description of Artificial Sequence: Synthetic oligonucleotide
  misc_feature 1..20: note = Description of Combined DNA/RNA Molecule: Synthetic oligonucleotide
  source 1..20: mol_type = other DNA
  modified_base 1: mod_base = OTHER; note = Uracil
  modified_base 3: mod_base = OTHER; note = Uracil
  modified_base 5: mod_base = OTHER; note = Uracil
  modified_base 9: mod_base = OTHER; note = Uracil
  modified_base 19: mod_base = OTHER; note = Uracil
  misc_feature join(1,3,5,7,9,11,13,15,17,19): note = RNA residue
  misc_feature join(2,4,6,8,10,12,14,16,18,20): note = DNA residue
tgtgttcatagtaaacattt

SEQ ID NO: 659 - DNA, 20 bp, synthetic construct
  misc_feature 1..20: note = Description of Artificial Sequence: Synthetic oligonucleotide
  misc_feature 1..20: note = Description of Combined DNA/RNA Molecule: Synthetic oligonucleotide
  source 1..20: mol_type = other DNA
  modified_base 1: mod_base = OTHER; note = Uracil
  modified_base 3: mod_base = OTHER; note = Uracil
  modified_base 5: mod_base = OTHER; note = Uracil
  modified_base 7: mod_base = OTHER; note = Uracil
  modified_base 9: mod_base = OTHER; note = Uracil
  modified_base 13: mod_base = OTHER; note = Uracil
  misc_feature join(1,3,5,7,9,11,13,15,17,19): note = RNA residue
  misc_feature join(2,4,6,8,10,12,14,16,18,20): note = DNA residue
tctgtgtgttcatagtaaac

SEQ ID NO: 660 - DNA, 20 bp, synthetic construct
  misc_feature 1..20: note = Description of Artificial Sequence: Synthetic oligonucleotide
  misc_feature 1..20: note = Description of Combined DNA/RNA Molecule: Synthetic oligonucleotide
  source 1..20: mol_type = other DNA
  modified_base 1: mod_base = OTHER; note = Uracil
  modified_base 11: mod_base = OTHER; note = Uracil
  modified_base 17: mod_base = OTHER; note = Uracil
  misc_feature join(1,3,5,7,9,11,13,15,17,19): note = RNA residue
  misc_feature join(2,4,6,8,10,12,14,16,18,20): note = DNA residue
ttctgtgtgttcatagtaaa

SEQ ID NO: 661 - DNA, 20 bp, synthetic construct
  misc_feature 1..20: note = Description of Artificial Sequence: Synthetic oligonucleotide
  misc_feature 1..20: note = Description of Combined DNA/RNA Molecule: Synthetic oligonucleotide
  source 1..20: mol_type = other DNA
  modified_base 1: mod_base = OTHER; note = Uracil
  modified_base 3: mod_base = OTHER; note = Uracil
  modified_base 5: mod_base = OTHER; note = Uracil
  modified_base 7: mod_base = OTHER; note = Uracil
  modified_base 9: mod_base = OTHER; note = Uracil
  modified_base 11: mod_base = OTHER; note = Uracil
  modified_base 13: mod_base = OTHER; note = Uracil
  modified_base 17: mod_base = OTHER; note = Uracil
  misc_feature join(1,3,5,7,9,11,13,15,17,19): note = RNA residue
  misc_feature join(2,4,6,8,10,12,14,16,18,20): note = DNA residue
tatttctgtgtgttcatagt

SEQ ID NO: 662 - DNA, 20 bp, synthetic construct
  misc_feature 1..20: note = Description of Artificial Sequence: Synthetic oligonucleotide
  misc_feature 1..20: note = Description of Combined DNA/RNA Molecule: Synthetic oligonucleotide
  source 1..20: mol_type = other DNA
  modified_base 3: mod_base = OTHER; note = Uracil
  modified_base 5: mod_base = OTHER; note = Uracil
  modified_base 7: mod_base = OTHER; note = Uracil
  modified_base 9: mod_base = OTHER; note = Uracil
  modified_base 13: mod_base = OTHER; note = Uracil
  modified_base 15: mod_base = OTHER; note = Uracil
  misc_feature join(1,3,5,7,9,11,13,15,17,19): note = RNA residue
  misc_feature join(2,4,6,8,10,12,14,16,18,20): note = DNA residue
gatatatatgaatttagcct

SEQ ID NO: 663 - DNA, 20 bp, synthetic construct
  misc_feature 1..20: note = Description of Artificial Sequence: Synthetic oligonucleotide
  misc_feature 1..20: note = Description of Combined DNA/RNA Molecule: Synthetic oligonucleotide
  source 1..20: mol_type = other DNA
  modified_base 15: mod_base = OTHER; note = Uracil
  misc_feature join(1,3,5,7,9,11,13,15,17,19): note = RNA residue
  misc_feature join(2,4,6,8,10,12,14,16,18,20): note = DNA residue
agatatatatgaatttagcc

SEQ ID NO: 664 - DNA, 20 bp, synthetic construct
  misc_feature 1..20: note = Description of Artificial Sequence: Synthetic oligonucleotide
  source 1..20: mol_type = other DNA
  misc_feature join(1,3,5,7,9,11,13,15,17,19): note = RNA residue
  misc_feature join(2,4,6,8,10,12,14,16,18,20): note = DNA residue
agacaaaagtatcaagatat

SEQ ID NO: 665 - DNA, 20 bp, synthetic construct
  misc_feature 1..20: note = Description of Artificial Sequence: Synthetic oligonucleotide
  misc_feature 1..20: note = Description of Combined DNA/RNA Molecule: Synthetic oligonucleotide
  source 1..20: mol_type = other DNA
  modified_base 3: mod_base = OTHER; note = Uracil
  modified_base 7: mod_base = OTHER; note = Uracil
  modified_base 11: mod_base = OTHER; note = Uracil
  modified_base 13: mod_base = OTHER; note = Uracil
  modified_base 15: mod_base = OTHER; note = Uracil
  misc_feature join(1,3,5,7,9,11,13,15,17,19): note = RNA residue
  misc_feature join(2,4,6,8,10,12,14,16,18,20): note = DNA residue
agttgattggtctttaaaaa

SEQ ID NO: 666 - DNA, 20 bp, synthetic construct
  misc_feature 1..20: note = Description of Artificial Sequence: Synthetic oligonucleotide
  misc_feature 1..20: note = Description of Combined DNA/RNA Molecule: Synthetic oligonucleotide
  source 1..20: mol_type = other DNA
  modified_base 11: mod_base = OTHER; note = Uracil
  modified_base 15: mod_base = OTHER; note = Uracil
  misc_feature join(1,3,5,7,9,11,13,15,17,19): note = RNA residue
  misc_feature join(2,4,6,8,10,12,14,16,18,20): note = DNA residue
ccctataagttgattggtct

SEQ ID NO: 667 - DNA, 20 bp, synthetic construct
  misc_feature 1..20: note = Description of Artificial Sequence: Synthetic oligonucleotide
  misc_feature 1..20: note = Description of Combined DNA/RNA Molecule: Synthetic oligonucleotide
  source 1..20: mol_type = other DNA
  modified_base 9: mod_base = OTHER; note = Uracil
  modified_base 11: mod_base = OTHER; note = Uracil
  modified_base 15: mod_base = OTHER; note = Uracil
  misc_feature join(1,3,5,7,9,11,13,15,17,19): note = RNA residue
  misc_feature join(2,4,6,8,10,12,14,16,18,20): note = DNA residue
aaaaagcctttgaattccct

SEQ ID NO: 668 - DNA, 20 bp, synthetic construct
  misc_feature 1..20: note = Description of Artificial Sequence: Synthetic oligonucleotide
  misc_feature 1..20: note = Description of Combined DNA/RNA Molecule: Synthetic oligonucleotide
  source 1..20: mol_type = other DNA
  modified_base 1: mod_base = OTHER; note = Uracil
  modified_base 5: mod_base = OTHER; note = Uracil
  modified_base 7: mod_base = OTHER; note = Uracil
  modified_base 11: mod_base = OTHER; note = Uracil
  modified_base 13: mod_base = OTHER; note = Uracil
  modified_base 17: mod_base = OTHER; note = Uracil
  misc_feature join(1,3,5,7,9,11,13,15,17,19): note = RNA residue
  misc_feature join(2,4,6,8,10,12,14,16,18,20): note = DNA residue
taaattttagtttggctgaa

SEQ ID NO: 669 - DNA, 20 bp, synthetic construct
  misc_feature 1..20: note = Description of Artificial Sequence: Synthetic oligonucleotide
  misc_feature 1..20: note = Description of Combined DNA/RNA Molecule: Synthetic oligonucleotide
  source 1..20: mol_type = other DNA
  modified_base 1: mod_base = OTHER; note = Uracil
  modified_base 7: mod_base = OTHER; note = Uracil
  modified_base 9: mod_base = OTHER; note = Uracil
  modified_base 13: mod_base = OTHER; note = Uracil
  misc_feature join(1,3,5,7,9,11,13,15,17,19): note = RNA residue
  misc_feature join(2,4,6,8,10,12,14,16,18,20): note = DNA residue
ttaaattttagtttggctga

SEQ ID NO: 670 - DNA, 20 bp, synthetic construct
  misc_feature 1..20: note = Description of Artificial Sequence: Synthetic oligonucleotide
  misc_feature 1..20: note = Description of Combined DNA/RNA Molecule: Synthetic oligonucleotide
  source 1..20: mol_type = other DNA
  modified_base 1: mod_base = OTHER; note = Uracil
  modified_base 3: mod_base = OTHER; note = Uracil
  modified_base 7: mod_base = OTHER; note = Uracil
  modified_base 9: mod_base = OTHER; note = Uracil
  modified_base 13: mod_base = OTHER; note = Uracil
  modified_base 15: mod_base = OTHER; note = Uracil
  modified_base 19: mod_base = OTHER; note = Uracil
  misc_feature join(1,3,5,7,9,11,13,15,17,19): note = RNA residue
  misc_feature join(2,4,6,8,10,12,14,16,18,20): note = DNA residue
tttaaattttagtttggctg

SEQ ID NO: 671 - DNA, 20 bp, synthetic construct
  misc_feature 1..20: note = Description of Artificial Sequence: Synthetic oligonucleotide
  misc_feature 1..20: note = Description of Combined DNA/RNA Molecule: Synthetic oligonucleotide
  source 1..20: mol_type = other DNA
  modified_base 3: mod_base = OTHER; note = Uracil
  modified_base 9: mod_base = OTHER; note = Uracil
  modified_base 11: mod_base = OTHER; note = Uracil
  modified_base 15: mod_base = OTHER; note = Uracil
  misc_feature join(1,3,5,7,9,11,13,15,17,19): note = RNA residue
  misc_feature join(2,4,6,8,10,12,14,16,18,20): note = DNA residue
gtttaaattttagtttggct

SEQ ID NO: 672 - DNA, 20 bp, synthetic construct
  misc_feature 1..20: note = Description of Artificial Sequence: Synthetic oligonucleotide
  misc_feature 1..20: note = Description of Combined DNA/RNA Molecule: Synthetic oligonucleotide
  source 1..20: mol_type = other DNA
  modified_base 1: mod_base = OTHER; note = Uracil
  modified_base 7: mod_base = OTHER; note = Uracil
  modified_base 11: mod_base = OTHER; note = Uracil
  modified_base 17: mod_base = OTHER; note = Uracil
  misc_feature join(1,3,5,7,9,11,13,15,17,19): note = RNA residue
  misc_feature join(2,4,6,8,10,12,14,16,18,20): note = DNA residue
ttagagtcagttcaaattaa

SEQ ID NO: 673 - DNA, 20 bp, synthetic construct
  misc_feature 1..20: note = Description of Artificial Sequence: Synthetic oligonucleotide
  misc_feature 1..20: note = Description of Combined DNA/RNA Molecule: Synthetic oligonucleotide
  source 1..20: mol_type = other DNA
  modified_base 1: mod_base = OTHER; note = Uracil
  modified_base 3: mod_base = OTHER; note = Uracil
  modified_base 13: mod_base = OTHER; note = Uracil
  modified_base 19: mod_base = OTHER; note = Uracil
  misc_feature join(1,3,5,7,9,11,13,15,17,19): note = RNA residue
  misc_feature join(2,4,6,8,10,12,14,16,18,20): note = DNA residue
tttagagtcagttcaaatta

SEQ ID NO: 674 - DNA, 20 bp, synthetic construct
  misc_feature 1..20: note = Description of Artificial Sequence: Synthetic oligonucleotide
  misc_feature 1..20: note = Description of Combined DNA/RNA Molecule: Synthetic oligonucleotide
  source 1..20: mol_type = other DNA
  modified_base 1: mod_base = OTHER; note = Uracil
  modified_base 3: mod_base = OTHER; note = Uracil
  modified_base 9: mod_base = OTHER; note = Uracil
  modified_base 13: mod_base = OTHER; note = Uracil
  modified_base 19: mod_base = OTHER; note = Uracil
  misc_feature join(1,3,5,7,9,11,13,15,17,19): note = RNA residue
  misc_feature join(2,4,6,8,10,12,14,16,18,20): note = DNA residue
ttttagagtcagttcaaatt

SEQ ID NO: 675 - DNA, 20 bp, synthetic construct
  misc_feature 1..20: note = Description of Artificial Sequence: Synthetic oligonucleotide
  misc_feature 1..20: note = Description of Combined DNA/RNA Molecule: Synthetic oligonucleotide
  source 1..20: mol_type = other DNA
  modified_base 1: mod_base = OTHER; note = Uracil
  modified_base 5: mod_base = OTHER; note = Uracil
  modified_base 7: mod_base = OTHER; note = Uracil
  modified_base 13: mod_base = OTHER; note = Uracil
  modified_base 17: mod_base = OTHER; note = Uracil
  misc_feature join(1,3,5,7,9,11,13,15,17,19): note = RNA residue
  misc_feature join(2,4,6,8,10,12,14,16,18,20): note = DNA residue
tcatttttagagtcagttca

SEQ ID NO: 676 - DNA, 20 bp, synthetic construct
  misc_feature 1..20: note = Description of Artificial Sequence: Synthetic oligonucleotide
  misc_feature 1..20: note = Description of Combined DNA/RNA Molecule: Synthetic oligonucleotide
  source 1..20: mol_type = other DNA
  modified_base 1: mod_base = OTHER; note = Uracil
  modified_base 5: mod_base = OTHER; note = Uracil
  modified_base 7: mod_base = OTHER; note = Uracil
  modified_base 9: mod_base = OTHER; note = Uracil
  modified_base 19: mod_base = OTHER; note = Uracil
  misc_feature join(1,3,5,7,9,11,13,15,17,19): note = RNA residue
  misc_feature join(2,4,6,8,10,12,14,16,18,20): note = DNA residue
ttcatttttagagtcagttc

SEQ ID NO: 677 - DNA, 20 bp, synthetic construct
  misc_feature 1..20: note = Description of Artificial Sequence: Synthetic oligonucleotide
  misc_feature 1..20: note = Description of Combined DNA/RNA Molecule: Synthetic oligonucleotide
  source 1..20: mol_type = other DNA
  modified_base 3: mod_base = OTHER; note = Uracil
  misc_feature join(1,3,5,7,9,11,13,15,17,19): note = RNA residue
  misc_feature join(2,4,6,8,10,12,14,16,18,20): note = DNA residue
gttcacaaagggaaaaatac

SEQ ID NO: 678 - DNA, 20 bp, synthetic construct
  misc_feature 1..20: note = Description of Artificial Sequence: Synthetic oligonucleotide
  misc_feature 1..20: note = Description of Combined DNA/RNA Molecule: Synthetic oligonucleotide
  source 1..20: mol_type = other DNA
  modified_base 5: mod_base = OTHER; note = Uracil
  modified_base 9: mod_base = OTHER; note = Uracil
  modified_base 11: mod_base = OTHER; note = Uracil
  modified_base 17: mod_base = OTHER; note = Uracil
  misc_feature join(1,3,5,7,9,11,13,15,17,19): note = RNA residue
  misc_feature join(2,4,6,8,10,12,14,16,18,20): note = DNA residue
ctgctccttgtaaaatttgt

SEQ ID NO: 679 - DNA, 20 bp, synthetic construct
  misc_feature 1..20: note = Description of Artificial Sequence: Synthetic oligonucleotide
  misc_feature 1..20: note = Description of Combined DNA/RNA Molecule: Synthetic oligonucleotide
  source 1..20: mol_type = other DNA
  modified_base 3: mod_base = OTHER; note = Uracil
  modified_base 9: mod_base = OTHER; note = Uracil
  modified_base 17: mod_base = OTHER; note = Uracil
  modified_base 19: mod_base = OTHER; note = Uracil
  misc_feature join(1,3,5,7,9,11,13,15,17,19): note = RNA residue
  misc_feature join(2,4,6,8,10,12,14,16,18,20): note = DNA residue
gctgctccttgtaaaatttg

SEQ ID NO: 680 - DNA, 20 bp, synthetic construct
  misc_feature 1..20: note = Description of Artificial Sequence: Synthetic oligonucleotide
  misc_feature 1..20: note = Description of Combined DNA/RNA Molecule: Synthetic oligonucleotide
  source 1..20: mol_type = other DNA
  modified_base 1: mod_base = OTHER; note = Uracil
  modified_base 3: mod_base = OTHER; note = Uracil
  modified_base 5: mod_base = OTHER; note = Uracil
  modified_base 7: mod_base = OTHER; note = Uracil
  modified_base 17: mod_base = OTHER; note = Uracil
  misc_feature join(1,3,5,7,9,11,13,15,17,19): note = RNA residue
  misc_feature join(2,4,6,8,10,12,14,16,18,20): note = DNA residue
tgtttattaaataggctgct

SEQ ID NO: 681 - DNA, 20 bp, synthetic construct
  misc_feature 1..20: note = Description of Artificial Sequence: Synthetic oligonucleotide
  misc_feature 1..20: note = Description of Combined DNA/RNA Molecule: Synthetic oligonucleotide
  source 1..20: mol_type = other DNA
  modified_base 5: mod_base = OTHER; note = Uracil
  modified_base 9: mod_base = OTHER; note = Uracil
  modified_base 13: mod_base = OTHER; note = Uracil
  misc_feature join(1,3,5,7,9,11,13,15,17,19): note = RNA residue
  misc_feature join(2,4,6,8,10,12,14,16,18,20): note = DNA residue
gtgtttattaaataggctgc

SEQ ID NO: 682 - DNA, 20 bp, synthetic construct
  misc_feature 1..20: note = Description of Artificial Sequence: Synthetic oligonucleotide
  misc_feature 1..20: note = Description of Combined DNA/RNA Molecule: Synthetic oligonucleotide
  source 1..20: mol_type = other DNA
  modified_base 1: mod_base = OTHER; note = Uracil
  modified_base 7: mod_base = OTHER; note = Uracil
  modified_base 11: mod_base = OTHER; note = Uracil
  modified_base 15: mod_base = OTHER; note = Uracil
  misc_feature join(1,3,5,7,9,11,13,15,17,19): note = RNA residue
  misc_feature join(2,4,6,8,10,12,14,16,18,20): note = DNA residue
tagtgtttattaaataggct

SEQ ID NO: 683 - DNA, 20 bp, synthetic construct
  misc_feature 1..20: note = Description of Artificial Sequence: Synthetic oligonucleotide
  misc_feature 1..20: note = Description of Combined DNA/RNA Molecule: Synthetic oligonucleotide
  source 1..20: mol_type = other DNA
  modified_base 5: mod_base = OTHER; note = Uracil
  modified_base 7: mod_base = OTHER; note = Uracil
  modified_base 9: mod_base = OTHER; note = Uracil
  modified_base 11: mod_base = OTHER; note = Uracil
  misc_feature join(1,3,5,7,9,11,13,15,17,19): note = RNA residue
  misc_feature join(2,4,6,8,10,12,14,16,18,20): note = DNA residue
ctagtgtttattaaataggc

SEQ ID NO: 684 - DNA, 20 bp, synthetic construct
  misc_feature 1..20: note = Description of Artificial Sequence: Synthetic oligonucleotide
  misc_feature 1..20: note = Description of Combined DNA/RNA Molecule: Synthetic oligonucleotide
  source 1..20: mol_type = other DNA
  modified_base 3: mod_base = OTHER; note = Uracil
  modified_base 9: mod_base = OTHER; note = Uracil
  modified_base 13: mod_base = OTHER; note = Uracil
  modified_base 17: mod_base = OTHER; note = Uracil
  misc_feature join(1,3,5,7,9,11,13,15,17,19): note = RNA residue
  misc_feature join(2,4,6,8,10,12,14,16,18,20): note = DNA residue
gctagtgtttattaaatagg

SEQ ID NO: 685 - DNA, 20 bp, synthetic construct
  misc_feature 1..20: note = Description of Artificial Sequence: Synthetic oligonucleotide
  misc_feature 1..20: note = Description of Combined DNA/RNA Molecule: Synthetic oligonucleotide
  source 1..20: mol_type = other DNA
  modified_base 7: mod_base = OTHER; note = Uracil
  modified_base 9: mod_base = OTHER; note = Uracil
  modified_base 13: mod_base = OTHER; note = Uracil
  modified_base 17: mod_base = OTHER; note = Uracil
  misc_feature join(1,3,5,7,9,11,13,15,17,19): note = RNA residue
  misc_feature join(2,4,6,8,10,12,14,16,18,20): note = DNA residue
aaagcctatactttgtttaa

SEQ ID NO: 686 - DNA, 20 bp, synthetic construct
  misc_feature 1..20: note = Description of Artificial Sequence: Synthetic oligonucleotide
  misc_feature 1..20: note = Description of Combined DNA/RNA Molecule: Synthetic oligonucleotide
  source 1..20: mol_type = other DNA
  modified_base 1: mod_base = OTHER; note = Uracil
  modified_base 15: mod_base = OTHER; note = Uracil
  modified_base 17: mod_base = OTHER; note = Uracil
  misc_feature join(1,3,5,7,9,11,13,15,17,19): note = RNA residue
  misc_feature join(2,4,6,8,10,12,14,16,18,20): note = DNA residue
tcagctgaaaagcctatact

SEQ ID NO: 687 - DNA, 20 bp, synthetic construct
  misc_feature 1..20: note = Description of Artificial Sequence: Synthetic oligonucleotide
  misc_feature 1..20: note = Description of Combined DNA/RNA Molecule: Synthetic oligonucleotide
  source 1..20: mol_type = other DNA
  modified_base 7: mod_base = OTHER; note = Uracil
  misc_feature join(1,3,5,7,9,11,13,15,17,19): note = RNA residue
  misc_feature join(2,4,6,8,10,12,14,16,18,20): note = DNA residue
atcagctgaaaagcctatac

SEQ ID NO: 688 - DNA, 20 bp, synthetic construct
  misc_feature 1..20: note = Description of Artificial Sequence: Synthetic oligonucleotide
  misc_feature 1..20: note = Description of Combined DNA/RNA Molecule: Synthetic oligonucleotide
  source 1..20: mol_type = other DNA
  modified_base 1: mod_base = OTHER; note = Uracil
  modified_base 3: mod_base = OTHER; note = Uracil
  modified_base 17: mod_base = OTHER; note = Uracil
  modified_base 19: mod_base = OTHER; note = Uracil
  misc_feature join(1,3,5,7,9,11,13,15,17,19): note = RNA residue
  misc_feature join(2,4,6,8,10,12,14,16,18,20): note = DNA residue
tatcagctgaaaagcctata

SEQ ID NO: 689 - DNA, 20 bp, synthetic construct
  misc_feature 1..20: note = Description of Artificial Sequence: Synthetic oligonucleotide
  misc_feature 1..20: note = Description of Combined DNA/RNA Molecule: Synthetic oligonucleotide
  source 1..20: mol_type = other DNA
  modified_base 9: mod_base = OTHER; note = Uracil
  misc_feature join(1,3,5,7,9,11,13,15,17,19): note = RNA residue
  misc_feature join(2,4,6,8,10,12,14,16,18,20): note = DNA residue
gtatcagctgaaaagcctat

SEQ ID NO: 690 - DNA, 20 bp, synthetic construct
  misc_feature 1..20: note = Description of Artificial Sequence: Synthetic oligonucleotide
  misc_feature 1..20: note = Description of Combined DNA/RNA Molecule: Synthetic oligonucleotide
  source 1..20: mol_type = other DNA
  modified_base 3: mod_base = OTHER; note = Uracil
  modified_base 5: mod_base = OTHER; note = Uracil
  modified_base 19: mod_base = OTHER; note = Uracil
  misc_feature join(1,3,5,7,9,11,13,15,17,19): note = RNA residue
  misc_feature join(2,4,6,8,10,12,14,16,18,20): note = DNA residue
ggtatcagctgaaaagccta

SEQ ID NO: 691 - DNA, 20 bp, synthetic construct
  misc_feature 1..20: note = Description of Artificial Sequence: Synthetic oligonucleotide
  misc_feature 1..20: note = Description of Combined DNA/RNA Molecule: Synthetic oligonucleotide
  source 1..20: mol_type = other DNA
  modified_base 1: mod_base = OTHER; note = Uracil
  modified_base 3: mod_base = OTHER; note = Uracil
  modified_base 5: mod_base = OTHER; note = Uracil
  modified_base 7: mod_base = OTHER; note = Uracil
  modified_base 19: mod_base = OTHER; note = Uracil
  misc_feature join(1,3,5,7,9,11,13,15,17,19): note = RNA residue
  misc_feature join(2,4,6,8,10,12,14,16,18,20): note = DNA residue
tgtatatccacagaaactta

SEQ ID NO: 692 - DNA, 20 bp, synthetic construct
  misc_feature 1..20: note = Description of Artificial Sequence: Synthetic oligonucleotide
  misc_feature 1..20: note = Description of Combined DNA/RNA Molecule: Synthetic oligonucleotide
  source 1..20: mol_type = other DNA
  modified_base 3: mod_base = OTHER; note = Uracil
  modified_base 5: mod_base = OTHER; note = Uracil
  modified_base 9: mod_base = OTHER; note = Uracil
  modified_base 11: mod_base = OTHER; note = Uracil
  modified_base 13: mod_base = OTHER; note = Uracil
  modified_base 15: mod_base = OTHER; note = Uracil
  misc_feature join(1,3,5,7,9,11,13,15,17,19): note = RNA residue
  misc_feature join(2,4,6,8,10,12,14,16,18,20): note = DNA residue
ctttttgctgtatatccaca

SEQ ID NO: 693 - DNA, 20 bp, synthetic construct
  misc_feature 1..20: note = Description of Artificial Sequence: Synthetic oligonucleotide
  misc_feature 1..20: note = Description of Combined DNA/RNA Molecule: Synthetic oligonucleotide
  source 1..20: mol_type = other DNA
  modified_base 1: mod_base = OTHER; note = Uracil
  modified_base 3: mod_base = OTHER; note = Uracil
  modified_base 5: mod_base = OTHER; note = Uracil
  modified_base 7: mod_base = OTHER; note = Uracil
  misc_feature join(1,3,5,7,9,11,13,15,17,19): note = RNA residue
  misc_feature join(2,4,6,8,10,12,14,16,18,20): note = DNA residue
tctttttgctgtatatccac

SEQ ID NO: 694 - DNA, 20 bp, synthetic construct
  misc_feature 1..20: note = Description of Artificial Sequence: Synthetic oligonucleotide
  misc_feature 1..20: note = Description of Combined DNA/RNA Molecule: Synthetic oligonucleotide
  source 1..20: mol_type = other DNA
  modified_base 5: mod_base = OTHER; note = Uracil
  modified_base 7: mod_base = OTHER; note = Uracil
  modified_base 11: mod_base = OTHER; note = Uracil
  modified_base 13: mod_base = OTHER; note = Uracil
  modified_base 15: mod_base = OTHER; note = Uracil
  modified_base 17: mod_base = OTHER; note = Uracil
  misc_feature join(1,3,5,7,9,11,13,15,17,19): note = RNA residue
  misc_feature join(2,4,6,8,10,12,14,16,18,20): note = DNA residue
ctctttttgctgtatatcca

SEQ ID NO: 695 - DNA, 20 bp, synthetic construct
  misc_feature 1..20: note = Description of Artificial Sequence: Synthetic oligonucleotide
  misc_feature 1..20: note = Description of Combined DNA/RNA Molecule: Synthetic oligonucleotide
  source 1..20: mol_type = other DNA
  modified_base 1: mod_base = OTHER; note = Uracil
  modified_base 3: mod_base = OTHER; note = Uracil
  modified_base 5: mod_base = OTHER; note = Uracil
  modified_base 7: mod_base = OTHER; note = Uracil
  modified_base 9: mod_base = OTHER; note = Uracil
  misc_feature join(1,3,5,7,9,11,13,15,17,19): note = RNA residue
  misc_feature join(2,4,6,8,10,12,14,16,18,20): note = DNA residue
tctctttttgctgtatatcc

SEQ ID NO: 696 - DNA, 20 bp, synthetic construct
  misc_feature 1..20: note = Description of Artificial Sequence: Synthetic oligonucleotide
  misc_feature 1..20: note = Description of Combined DNA/RNA Molecule: Synthetic oligonucleotide
  source 1..20: mol_type = other DNA
  modified_base 7: mod_base = OTHER; note = Uracil
  modified_base 9: mod_base = OTHER; note = Uracil
  modified_base 13: mod_base = OTHER; note = Uracil
  modified_base 15: mod_base = OTHER; note = Uracil
  modified_base 17: mod_base = OTHER; note = Uracil
  modified_base 19: mod_base = OTHER; note = Uracil
  misc_feature join(1,3,5,7,9,11,13,15,17,19): note = RNA residue
  misc_feature join(2,4,6,8,10,12,14,16,18,20): note = DNA residue
atctctttttgctgtatatc

SEQ ID NO: 697 - DNA, 20 bp, synthetic construct
  misc_feature 1..20: note = Description of Artificial Sequence: Synthetic oligonucleotide
  misc_feature 1..20: note = Description of Combined DNA/RNA Molecule: Synthetic oligonucleotide
  source 1..20: mol_type = other DNA
  modified_base 9: mod_base = OTHER; note = Uracil
  modified_base 11: mod_base = OTHER; note = Uracil
  modified_base 15: mod_base = OTHER; note = Uracil
  modified_base 17: mod_base = OTHER; note = Uracil
  modified_base 19: mod_base = OTHER; note = Uracil
  misc_feature join(1,3,5,7,9,11,13,15,17,19): note = RNA residue
  misc_feature join(2,4,6,8,10,12,14,16,18,20): note = DNA residue
atatctctttttgctgtata

SEQ ID NO: 698 - DNA, 20 bp, synthetic construct
  misc_feature 1..20: note = Description of Artificial Sequence: Synthetic oligonucleotide
  misc_feature 1..20: note = Description of Combined DNA/RNA Molecule: Synthetic oligonucleotide
  source 1..20: mol_type = other DNA
  modified_base 1: mod_base = OTHER; note = Uracil
  modified_base 3: mod_base = OTHER; note = Uracil
  modified_base 5: mod_base = OTHER; note = Uracil
  modified_base 7: mod_base = OTHER; note = Uracil
  modified_base 9: mod_base = OTHER; note = Uracil
  modified_base 11: mod_base = OTHER; note = Uracil
  modified_base 13: mod_base = OTHER; note = Uracil
  misc_feature join(1,3,5,7,9,11,13,15,17,19): note = RNA residue
  misc_feature join(2,4,6,8,10,12,14,16,18,20): note = DNA residue
tatatctctttttgctgtat

SEQ ID NO: 699 - DNA, 20 bp, synthetic construct
  misc_feature 1..20: note = Description of Artificial Sequence: Synthetic oligonucleotide
  misc_feature 1..20: note = Description of Combined DNA/RNA Molecule: Synthetic oligonucleotide
  source 1..20: mol_type = other DNA
  modified_base 1: mod_base = OTHER; note = Uracil
  modified_base 11: mod_base = OTHER; note = Uracil
  modified_base 13: mod_base = OTHER; note = Uracil
  modified_base 17: mod_base = OTHER; note = Uracil
  modified_base 19: mod_base = OTHER; note = Uracil
  misc_feature join(1,3,5,7,9,11,13,15,17,19): note = RNA residue
  misc_feature join(2,4,6,8,10,12,14,16,18,20): note = DNA residue
ttatatctctttttgctgta

SEQ ID NO: 700 - DNA, 20 bp, synthetic construct
  misc_feature 1..20: note = Description of Artificial Sequence: Synthetic oligonucleotide
  misc_feature 1..20: note = Description of Combined DNA/RNA Molecule: Synthetic oligonucleotide
  source 1..20: mol_type = other DNA
  modified_base 3: mod_base = OTHER; note = Uracil
  modified_base 5: mod_base = OTHER; note = Uracil
  modified_base 9: mod_base = OTHER; note = Uracil
  modified_base 11: mod_base = OTHER; note = Uracil
  modified_base 13: mod_base = OTHER; note = Uracil
  modified_base 15: mod_base = OTHER; note = Uracil
  misc_feature join(1,3,5,7,9,11,13,15,17,19): note = RNA residue
  misc_feature join(2,4,6,8,10,12,14,16,18,20): note = DNA residue
attatatctctttttgctgt

SEQ ID NO: 701 - DNA, 20 bp, synthetic construct
  misc_feature 1..20: note = Description of Artificial Sequence: Synthetic oligonucleotide
  misc_feature 1..20: note = Description of Combined DNA/RNA Molecule: Synthetic oligonucleotide
  source 1..20: mol_type = other DNA
  modified_base 3: mod_base = OTHER; note = Uracil
  modified_base 13: mod_base = OTHER; note = Uracil
  modified_base 15: mod_base = OTHER; note = Uracil
  modified_base 19: mod_base = OTHER; note = Uracil
  misc_feature join(1,3,5,7,9,11,13,15,17,19): note = RNA residue
  misc_feature join(2,4,6,8,10,12,14,16,18,20): note = DNA residue
aattatatctctttttgctg

SEQ ID NO: 702 - DNA, 20 bp, synthetic construct
  misc_feature 1..20: note = Description of Artificial Sequence: Synthetic oligonucleotide
  misc_feature 1..20: note = Description of Combined DNA/RNA Molecule: Synthetic oligonucleotide
  source 1..20: mol_type = other DNA
  modified_base 3: mod_base = OTHER; note = Uracil
  modified_base 11: mod_base = OTHER; note = Uracil
  modified_base 13: mod_base = OTHER; note = Uracil
  misc_feature join(1,3,5,7,9,11,13,15,17,19): note = RNA residue
  misc_feature join(2,4,6,8,10,12,14,16,18,20): note = DNA residue
ggtaaagagctatgcacaga

SEQ ID NO: 703 - DNA, 20 bp, synthetic construct
  misc_feature 1..20: note = Description of Artificial Sequence: Synthetic oligonucleotide
  source 1..20: mol_type = other DNA
  misc_feature join(1,3,5,7,9,11,13,15,17,19): note = RNA residue
  misc_feature join(2,4,6,8,10,12,14,16,18,20): note = DNA residue
gggtaaagagctatgcacag

SEQ ID NO: 704 - DNA, 20 bp, synthetic construct
  misc_feature 1..20: note = Description of Artificial Sequence: Synthetic oligonucleotide
  misc_feature 1..20: note = Description of Combined DNA/RNA Molecule: Synthetic oligonucleotide
  source 1..20: mol_type = other DNA
  modified_base 5: mod_base = OTHER; note = Uracil
  modified_base 13: mod_base = OTHER; note = Uracil
  modified_base 15: mod_base = OTHER; note = Uracil
  misc_feature join(1,3,5,7,9,11,13,15,17,19): note = RNA residue
  misc_feature join(2,4,6,8,10,12,14,16,18,20): note = DNA residue
agggtaaagagctatgcaca

SEQ ID NO: 705 - DNA, 20 bp, synthetic construct
  misc_feature 1..20: note = Description of Artificial Sequence: Synthetic oligonucleotide
  source 1..20: mol_type = other DNA
  misc_feature join(1,3,5,7,9,11,13,15,17,19): note = RNA residue
  misc_feature join(2,4,6,8,10,12,14,16,18,20): note = DNA residue
cagggtaaagagctatgcac

SEQ ID NO: 706 - DNA, 20 bp, synthetic construct
  misc_feature 1..20: note = Description of Artificial Sequence: Synthetic oligonucleotide
  misc_feature 1..20: note = Description of Combined DNA/RNA Molecule: Synthetic oligonucleotide
  source 1..20: mol_type = other DNA
  modified_base 7: mod_base = OTHER; note = Uracil
  modified_base 15: mod_base = OTHER; note = Uracil
  modified_base 17: mod_base = OTHER; note = Uracil
  misc_feature join(1,3,5,7,9,11,13,15,17,19): note = RNA residue
  misc_feature join(2,4,6,8,10,12,14,16,18,20): note = DNA residue
acagggtaaagagctatgca

SEQ ID NO: 707 - DNA, 20 bp, synthetic construct
  misc_feature 1..20: note = Description of Artificial Sequence: Synthetic oligonucleotide
  source 1..20: mol_type = other DNA
  misc_feature join(1,3,5,7,9,11,13,15,17,19): note = RNA residue
  misc_feature join(2,4,6,8,10,12,14,16,18,20): note = DNA residue
aacacagggtaaagagctat

SEQ ID NO: 708 - DNA, 20 bp, synthetic construct
  misc_feature 1..20: note = Description of Artificial Sequence: Synthetic oligonucleotide
  misc_feature 1..20: note = Description of Combined DNA/RNA Molecule: Synthetic oligonucleotide
  source 1..20: mol_type = other DNA
  modified_base 13: mod_base = OTHER; note = Uracil
  modified_base 19: mod_base = OTHER; note = Uracil
  misc_feature join(1,3,5,7,9,11,13,15,17,19): note = RNA residue
  misc_feature join(2,4,6,8,10,12,14,16,18,20): note = DNA residue
gccaagctctattaacaata

SEQ ID NO: 709 - DNA, 20 bp, synthetic construct
  misc_feature 1..20: note = Description of Artificial Sequence: Synthetic oligonucleotide
  misc_feature 1..20: note = Description of Combined DNA/RNA Molecule: Synthetic oligonucleotide
  source 1..20: mol_type = other DNA
  modified_base 1: mod_base = OTHER; note = Uracil
  modified_base 9: mod_base = OTHER; note = Uracil
  modified_base 11: mod_base = OTHER; note = Uracil
  modified_base 13: mod_base = OTHER; note = Uracil
  misc_feature join(1,3,5,7,9,11,13,15,17,19): note = RNA residue
  misc_feature join(2,4,6,8,10,12,14,16,18,20): note = DNA residue
tgccaagctctattaacaat

SEQ ID NO: 710 - DNA, 20 bp, synthetic construct
  misc_feature 1..20: note = Description of Artificial Sequence: Synthetic oligonucleotide
  misc_feature 1..20: note = Description of Combined DNA/RNA Molecule: Synthetic oligonucleotide
  source 1..20: mol_type = other DNA
  modified_base 1: mod_base = OTHER; note = Uracil
  modified_base 15: mod_base = OTHER; note = Uracil
  misc_feature join(1,3,5,7,9,11,13,15,17,19): note = RNA residue
  misc_feature join(2,4,6,8,10,12,14,16,18,20): note = DNA residue
ttgccaagctctattaacaa

SEQ ID NO: 711 - DNA, 20 bp, synthetic construct
  misc_feature 1..20: note = Description of Artificial Sequence: Synthetic oligonucleotide
  misc_feature 1..20: note = Description of Combined DNA/RNA Molecule: Synthetic oligonucleotide
  source 1..20: mol_type = other DNA
  modified_base 1: mod_base = OTHER; note = Uracil
  modified_base 3: mod_base = OTHER; note = Uracil
  modified_base 11: mod_base = OTHER; note = Uracil
  modified_base 13: mod_base = OTHER; note = Uracil
  modified_base 15: mod_base = OTHER; note = Uracil
  misc_feature join(1,3,5,7,9,11,13,15,17,19): note = RNA residue
  misc_feature join(2,4,6,8,10,12,14,16,18,20): note = DNA residue
tttgccaagctctattaaca

SEQ ID NO: 712 - DNA, 20 bp, synthetic construct
  misc_feature 1..20: note = Description of Artificial Sequence: Synthetic oligonucleotide
  misc_feature 1..20: note = Description of Combined DNA/RNA Molecule: Synthetic oligonucleotide
  source 1..20: mol_type = other DNA
  modified_base 5: mod_base = OTHER; note = Uracil
  modified_base 7: mod_base = OTHER; note = Uracil
  modified_base 15: mod_base = OTHER; note = Uracil
  modified_base 17: mod_base = OTHER; note = Uracil
  modified_base 19: mod_base = OTHER; note = Uracil
  misc_feature join(1,3,5,7,9,11,13,15,17,19): note = RNA residue
  misc_feature join(2,4,6,8,10,12,14,16,18,20): note = DNA residue
ataatttgccaagctctatt

SEQ ID NO: 713 - DNA, 20 bp, synthetic construct
  misc_feature 1..20: note = Description of Artificial Sequence: Synthetic oligonucleotide
  misc_feature 1..20: note = Description of Combined DNA/RNA Molecule: Synthetic oligonucleotide
  source 1..20: mol_type = other DNA
  modified_base 1: mod_base = OTHER; note = Uracil
  modified_base 3: mod_base = OTHER; note = Uracil
  modified_base 7: mod_base = OTHER; note = Uracil
  misc_feature join(1,3,5,7,9,11,13,15,17,19): note = RNA residue
  misc_feature join(2,4,6,8,10,12,14,16,18,20): note = DNA residue
tataatttgccaagctctat

SEQ ID NO: 714 - DNA, 20 bp, synthetic construct
  misc_feature 1..20: note = Description of Artificial Sequence: Synthetic oligonucleotide
  misc_feature 1..20: note = Description of Combined DNA/RNA Molecule: Synthetic oligonucleotide
  source 1..20: mol_type = other DNA
  modified_base 1: mod_base = OTHER; note = Uracil
  modified_base 7: mod_base = OTHER; note = Uracil
  modified_base 9: mod_base = OTHER; note = Uracil
  modified_base 17: mod_base = OTHER; note = Uracil
  modified_base 19: mod_base = OTHER; note = Uracil
  misc_feature join(1,3,5,7,9,11,13,15,17,19): note = RNA residue
  misc_feature join(2,4,6,8,10,12,14,16,18,20): note = DNA residue
ttataatttgccaagctcta

SEQ ID NO: 715 - DNA, 20 bp, synthetic construct
  misc_feature 1..20: note = Description of Artificial Sequence: Synthetic oligonucleotide
  misc_feature 1..20: note = Description of Combined DNA/RNA Molecule: Synthetic oligonucleotide
  source 1..20: mol_type = other DNA
  modified_base 3: mod_base = OTHER; note = Uracil
  modified_base 9: mod_base = OTHER; note = Uracil
  modified_base 11: mod_base = OTHER; note = Uracil
  modified_base 19: mod_base = OTHER; note = Uracil
  misc_feature join(1,3,5,7,9,11,13,15,17,19): note = RNA residue
  misc_feature join(2,4,6,8,10,12,14,16,18,20): note = DNA residue
atttataatttgccaagctc

SEQ ID NO: 716 - DNA, 20 bp, synthetic construct
  misc_feature 1..20: note = Description of Artificial Sequence: Synthetic oligonucleotide
  misc_feature 1..20: note = Description of Combined DNA/RNA Molecule: Synthetic oligonucleotide
  source 1..20: mol_type = other DNA
  modified_base 1: mod_base = OTHER; note = Uracil
  modified_base 3: mod_base = OTHER; note = Uracil
  modified_base 5: mod_base = OTHER; note = Uracil
  modified_base 7: mod_base = OTHER; note = Uracil
  modified_base 11: mod_base = OTHER; note = Uracil
  misc_feature join(1,3,5,7,9,11,13,15,17,19): note = RNA residue
  misc_feature join(2,4,6,8,10,12,14,16,18,20): note = DNA residue
tatttataatttgccaagct

SEQ ID NO: 717 - DNA, 20 bp, synthetic construct
  misc_feature 1..20: note = Description of Artificial Sequence: Synthetic oligonucleotide
  misc_feature 1..20: note = Description of Combined DNA/RNA Molecule: Synthetic oligonucleotide
  source 1..20: mol_type = other DNA
  modified_base 1: mod_base = OTHER; note = Uracil
  modified_base 5: mod_base = OTHER; note = Uracil
  modified_base 11: mod_base = OTHER; note = Uracil
  modified_base 13: mod_base = OTHER; note = Uracil
  misc_feature join(1,3,5,7,9,11,13,15,17,19): note = RNA residue
  misc_feature join(2,4,6,8,10,12,14,16,18,20): note = DNA residue
ttatttataatttgccaagc

SEQ ID NO: 718 - DNA, 20 bp, synthetic construct
  misc_feature 1..20: note = Description of Artificial Sequence: Synthetic oligonucleotide
  misc_feature 1..20: note = Description of Combined DNA/RNA Molecule: Synthetic oligonucleotide
  source 1..20: mol_type = other DNA
  modified_base 3: mod_base = OTHER; note = Uracil
  misc_feature join(1,3,5,7,9,11,13,15,17,19): note = RNA residue
  misc_feature join(2,4,6,8,10,12,14,16,18,20): note = DNA residue
acttctatctaaccatatac

SEQ ID NO: 719 - DNA, 20 bp, synthetic construct
  misc_feature 1..20: note = Description of Artificial Sequence: Synthetic oligonucleotide
  misc_feature 1..20: note = Description of Combined DNA/RNA Molecule: Synthetic oligonucleotide
  source 1..20: mol_type = other DNA
  modified_base 7: mod_base = OTHER; note = Uracil
  modified_base 9: mod_base = OTHER; note = Uracil
  modified_base 11: mod_base = OTHER; note = Uracil
  modified_base 13: mod_base = OTHER; note = Uracil
  modified_base 19: mod_base = OTHER; note = Uracil
  misc_feature join(1,3,5,7,9,11,13,15,17,19): note = RNA residue
  misc_feature join(2,4,6,8,10,12,14,16,18,20): note = DNA residue
gtcacttctatctaaccata

SEQ ID NO: 720 - DNA, 20 bp, synthetic construct
  misc_feature 1..20: note = Description of Artificial Sequence: Synthetic oligonucleotide
  misc_feature 1..20: note = Description of Combined DNA/RNA Molecule: Synthetic oligonucleotide
  source 1..20: mol_type = other DNA
  modified_base 3: mod_base = OTHER; note = Uracil
  modified_base 7: mod_base = OTHER; note = Uracil
  misc_feature join(1,3,5,7,9,11,13,15,17,19): note = RNA residue
  misc_feature join(2,4,6,8,10,12,14,16,18,20): note = DNA residue
agtcacttctatctaaccat

SEQ ID NO: 721 - DNA, 20 bp, synthetic construct
  misc_feature 1..20: note = Description of Artificial Sequence: Synthetic oligonucleotide
  misc_feature 1..20: note = Description of Combined DNA/RNA Molecule: Synthetic oligonucleotide
  source 1..20: mol_type = other DNA
  modified_base 1: mod_base = OTHER; note = Uracil
  modified_base 9: mod_base = OTHER; note = Uracil
  modified_base 11: mod_base = OTHER; note = Uracil
  modified_base 13: mod_base = OTHER; note = Uracil
  modified_base 15: mod_base = OTHER; note = Uracil
  misc_feature join(1,3,5,7,9,11,13,15,17,19): note = RNA residue
  misc_feature join(2,4,6,8,10,12,14,16,18,20): note = DNA residue
tagtcacttctatctaacca

SEQ ID NO: 722 - DNA, 20 bp, synthetic construct
  misc_feature 1..20: note = Description of Artificial Sequence: Synthetic oligonucleotide
  misc_feature 1..20: note = Description of Combined DNA/RNA Molecule: Synthetic oligonucleotide
  source 1..20: mol_type = other DNA
  modified_base 5: mod_base = OTHER; note = Uracil
  modified_base 9: mod_base = OTHER; note = Uracil
  misc_feature join(1,3,5,7,9,11,13,15,17,19): note = RNA residue
  misc_feature join(2,4,6,8,10,12,14,16,18,20): note = DNA residue
atagtcacttctatctaacc

SEQ ID NO: 723 - DNA, 20 bp, synthetic construct
  misc_feature 1..20: note = Description of Artificial Sequence: Synthetic oligonucleotide
  misc_feature 1..20: note = Description of Combined DNA/RNA Molecule: Synthetic oligonucleotide
  source 1..20: mol_type = other DNA
  modified_base 1: mod_base = OTHER; note = Uracil
  modified_base 3: mod_base = OTHER; note = Uracil
  modified_base 11: mod_base = OTHER; note = Uracil
  modified_base 13: mod_base = OTHER; note = Uracil
  modified_base 15: mod_base = OTHER; note = Uracil
  modified_base 17: mod_base = OTHER; note = Uracil
  misc_feature join(1,3,5,7,9,11,13,15,17,19): note = RNA residue
  misc_feature join(2,4,6,8,10,12,14,16,18,20): note = DNA residue
tatagtcacttctatctaac

SEQ ID NO: 724 - DNA, 20 bp, synthetic construct
  misc_feature 1..20: note = Description of Artificial Sequence: Synthetic oligonucleotide
  misc_feature 1..20: note = Description of Combined DNA/RNA Molecule: Synthetic oligonucleotide
  source 1..20: mol_type = other DNA
  modified_base 1: mod_base = OTHER; note = Uracil
  modified_base 7: mod_base = OTHER; note = Uracil
  modified_base 11: mod_base = OTHER; note = Uracil
  misc_feature join(1,3,5,7,9,11,13,15,17,19): note = RNA residue
  misc_feature join(2,4,6,8,10,12,14,16,18,20): note = DNA residue
ttatagtcacttctatctaa

SEQ ID NO: 725 - DNA, 20 bp, synthetic construct
  misc_feature 1..20: note = Description of Artificial Sequence: Synthetic oligonucleotide
  misc_feature 1..20: note = Description of Combined DNA/RNA Molecule: Synthetic oligonucleotide
  source 1..20: mol_type = other DNA
  modified_base 3: mod_base = OTHER; note = Uracil
  modified_base 5: mod_base = OTHER; note = Uracil
  modified_base 13: mod_base = OTHER; note = Uracil
  modified_base 15: mod_base = OTHER; note = Uracil
  modified_base 17: mod_base = OTHER; note = Uracil
  modified_base 19: mod_base = OTHER; note = Uracil
  misc_feature join(1,3,5,7,9,11,13,15,17,19): note = RNA residue
  misc_feature join(2,4,6,8,10,12,14,16,18,20): note = DNA residue
attatagtcacttctatcta

SEQ ID NO: 726 - DNA, 20 bp, synthetic construct
  misc_feature 1..20: note = Description of Artificial Sequence: Synthetic oligonucleotide
  misc_feature 1..20: note = Description of Combined DNA/RNA Molecule: Synthetic oligonucleotide
  source 1..20: mol_type = other DNA
  modified_base 3: mod_base = OTHER; note = Uracil
  modified_base 9: mod_base = OTHER; note = Uracil
  modified_base 13: mod_base = OTHER; note = Uracil
  misc_feature join(1,3,5,7,9,11,13,15,17,19): note = RNA residue
  misc_feature join(2,4,6,8,10,12,14,16,18,20): note = DNA residue
cattatagtcacttctatct

SEQ ID NO: 727 - DNA, 20 bp, synthetic construct
  misc_feature 1..20: note = Description of Artificial Sequence: Synthetic oligonucleotide
  misc_feature 1..20: note = Description of Combined DNA/RNA Molecule: Synthetic oligonucleotide
  source 1..20: mol_type = other DNA
  modified_base 5: mod_base = OTHER; note = Uracil
  modified_base 7: mod_base = OTHER; note = Uracil
  modified_base 15: mod_base = OTHER; note = Uracil
  modified_base 17: mod_base = OTHER; note = Uracil
  modified_base 19: mod_base = OTHER; note = Uracil
  misc_feature join(1,3,5,7,9,11,13,15,17,19): note = RNA residue
  misc_feature join(2,4,6,8,10,12,14,16,18,20): note = DNA residue
gcattatagtcacttctatc

SEQ ID NO: 728 - DNA, 20 bp, synthetic construct
  misc_feature 1..20: note = Description of Artificial Sequence: Synthetic oligonucleotide
  misc_feature 1..20: note = Description of Combined DNA/RNA Molecule: Synthetic oligonucleotide
  source 1..20: mol_type = other DNA
  modified_base 1: mod_base = OTHER; note = Uracil
  modified_base 5: mod_base = OTHER; note = Uracil
  modified_base 11: mod_base = OTHER; note = Uracil
  modified_base 15: mod_base = OTHER; note = Uracil
  misc_feature join(1,3,5,7,9,11,13,15,17,19): note = RNA residue
  misc_feature join(2,4,6,8,10,12,14,16,18,20): note = DNA residue
tgcattatagtcacttctat

SEQ ID NO: 729 - DNA, 20 bp, synthetic construct
  misc_feature 1..20: note = Description of Artificial Sequence: Synthetic oligonucleotide
  misc_feature 1..20: note = Description of Combined DNA/RNA Molecule: Synthetic oligonucleotide
  source 1..20: mol_type = other DNA
  modified_base 7: mod_base = OTHER; note = Uracil
  modified_base 9: mod_base = OTHER; note = Uracil
  modified_base 17: mod_base = OTHER; note = Uracil
  modified_base 19: mod_base = OTHER; note = Uracil
  misc_feature join(1,3,5,7,9,11,13,15,17,19): note = RNA residue
  misc_feature join(2,4,6,8,10,12,14,16,18,20): note = DNA residue
gtgcattatagtcacttcta

SEQ ID NO: 730 - DNA, 20 bp, synthetic construct
  misc_feature 1..20: note = Description of Artificial Sequence: Synthetic oligonucleotide
  misc_feature 1..20: note = Description of Combined DNA/RNA Molecule: Synthetic oligonucleotide
  source 1..20: mol_type = other DNA
  modified_base 5: mod_base = OTHER; note = Uracil
  modified_base 9: mod_base = OTHER; note = Uracil
  modified_base 11: mod_base = OTHER; note = Uracil
  modified_base 13: mod_base = OTHER; note = Uracil
  modified_base 7: mod_base = OTHER; note = Uracil
  modified_base 15: mod_base = OTHER; note = Uracil
  modified_base 17: mod_base = OTHER; note = Uracil
  modified_base 19: mod_base = OTHER; note = Uracil
  misc_feature join(1,3,5,7,9,11,13,15,17,19): note = RNA residue
  misc_feature join(2,4,6,8,10,12,14,16,18,20): note = DNA residue
gggctctgtgtgtctatata

SEQ ID NO: 731 - DNA, 20 bp, synthetic construct
  misc_feature 1..20: note = Description of Artificial Sequence: Synthetic oligonucleotide
  source 1..20: mol_type = other DNA
  misc_feature join(1,3,5,7,9,11,13,15,17,19): note = RNA residue
  misc_feature join(2,4,6,8,10,12,14,16,18,20): note = DNA residue
agggctctgtgtgtctatat

SEQ ID NO: 732 - DNA, 20 bp, synthetic construct
  misc_feature 1..20: note = Description of Artificial Sequence: Synthetic oligonucleotide
  misc_feature 1..20: note = Description of Combined DNA/RNA Molecule: Synthetic oligonucleotide
  source 1..20: mol_type = other DNA
  modified_base 7: mod_base = OTHER; note = Uracil
  modified_base 9: mod_base = OTHER; note = Uracil
  modified_base 11: mod_base = OTHER; note = Uracil
  modified_base 13: mod_base = OTHER; note = Uracil
  modified_base 15: mod_base = OTHER; note = Uracil
  modified_base 17: mod_base = OTHER; note = Uracil
  modified_base 19: mod_base = OTHER; note = Uracil
  misc_feature join(1,3,5,7,9,11,13,15,17,19): note = RNA residue
  misc_feature join(2,4,6,8,10,12,14,16,18,20): note = DNA residue
aagggctctgtgtgtctata

SEQ ID NO: 733 - DNA, 20 bp, synthetic construct
  misc_feature 1..20: note = Description of Artificial Sequence: Synthetic oligonucleotide
  source 1..20: mol_type = other DNA
  misc_feature join(1,3,5,7,9,11,13,15,17,19): note = RNA residue
  misc_feature join(2,4,6,8,10,12,14,16,18,20): note = DNA residue
gaagggctctgtgtgtctat

SEQ ID NO: 734 - DNA, 20 bp, synthetic construct
  misc_feature 1..20: note = Description of Artificial Sequence: Synthetic oligonucleotide
  misc_feature 1..20: note = Description of Combined DNA/RNA Molecule: Synthetic oligonucleotide
  source 1..20: mol_type = other DNA
  modified_base 1: mod_base = OTHER; note = Uracil
  modified_base 11: mod_base = OTHER; note = Uracil
  modified_base 13: mod_base = OTHER; note = Uracil
  modified_base 15: mod_base = OTHER; note = Uracil
  modified_base 17: mod_base = OTHER; note = Uracil
  modified_base 19: mod_base = OTHER; note = Uracil
  misc_feature join(1,3,5,7,9,11,13,15,17,19): note = RNA residue
  misc_feature join(2,4,6,8,10,12,14,16,18,20): note = DNA residue
tgaagggctctgtgtgtcta

SEQ ID NO: 735 - DNA, 20 bp, synthetic construct
  misc_feature 1..20: note = Description of Artificial Sequence: Synthetic oligonucleotide
  misc_feature 1..20: note = Description of Combined DNA/RNA Molecule: Synthetic oligonucleotide
  source 1..20: mol_type = other DNA
  modified_base 3: mod_base = OTHER; note = Uracil
  modified_base 11: mod_base = OTHER; note = Uracil
  modified_base 13: mod_base = OTHER; note = Uracil
  modified_base 17: mod_base = OTHER; note = Uracil
  modified_base 15: mod_base = OTHER; note = Uracil
  modified_base 19: mod_base = OTHER; note = Uracil
  misc_feature join(1,3,5,7,9,11,13,15,17,19): note = RNA residue
  misc_feature join(2,4,6,8,10,12,14,16,18,20): note = DNA residue
actgaagggctctgtgtgtc

SEQ ID NO: 736 - DNA, 20 bp, synthetic construct
  misc_feature 1..20: note = Description of Artificial Sequence: Synthetic oligonucleotide
  misc_feature 1..20: note = Description of Combined DNA/RNA Molecule: Synthetic oligonucleotide
  source 1..20: mol_type = other DNA
  modified_base 5: mod_base = OTHER; note = Uracil
  modified_base 13: mod_base = OTHER; note = Uracil
  modified_base 15: mod_base = OTHER; note = Uracil
  modified_base 17: mod_base = OTHER; note = Uracil
  modified_base 19: mod_base = OTHER; note = Uracil
  misc_feature join(1,3,5,7,9,11,13,15,17,19): note = RNA residue
  misc_feature join(2,4,6,8,10,12,14,16,18,20): note = DNA residue
gaactgaagggctctgtgtg

SEQ ID NO: 737 - DNA, 20 bp, synthetic construct
  misc_feature 1..20: note = Description of Artificial Sequence: Synthetic oligonucleotide
  misc_feature 1..20: note = Description of Combined DNA/RNA Molecule: Synthetic oligonucleotide
  source 1..20: mol_type = other DNA
  modified_base 1: mod_base = OTHER; note = Uracil
  misc_feature join(1,3,5,7,9,11,13,15,17,19): note = RNA residue
  misc_feature join(2,4,6,8,10,12,14,16,18,20): note = DNA residue
tgaactgaagggctctgtgt

SEQ ID NO: 738 - DNA, 20 bp, synthetic construct
  misc_feature 1..20: note = Description of Artificial Sequence: Synthetic oligonucleotide
  misc_feature 1..20: note = Description of Combined DNA/RNA Molecule: Synthetic oligonucleotide
  source 1..20: mol_type = other DNA
  modified_base 7: mod_base = OTHER; note = Uracil
  modified_base 15: mod_base = OTHER; note = Uracil
  modified_base 17: mod_base = OTHER; note = Uracil
  modified_base 19: mod_base = OTHER; note = Uracil
  misc_feature join(1,3,5,7,9,11,13,15,17,19): note = RNA residue
  misc_feature join(2,4,6,8,10,12,14,16,18,20): note = DNA residue
ctgaactgaagggctctgtg

SEQ ID NO: 739 - DNA, 20 bp, synthetic construct
  misc_feature 1..20: note = Description of Artificial Sequence: Synthetic oligonucleotide
  misc_feature 1..20: note = Description of Combined DNA/RNA Molecule: Synthetic oligonucleotide
  source 1..20: mol_type = other DNA
  modified_base 3: mod_base = OTHER; note = Uracil
  misc_feature join(1,3,5,7,9,11,13,15,17,19): note = RNA residue
  misc_feature join(2,4,6,8,10,12,14,16,18,20): note = DNA residue
cctgaactgaagggctctgt

SEQ ID NO: 740 - DNA, 20 bp, synthetic construct
  misc_feature 1..20: note = Description of Artificial Sequence: Synthetic oligonucleotide
  misc_feature 1..20: note = Description of Combined DNA/RNA Molecule: Synthetic oligonucleotide
  source 1..20: mol_type = other DNA
  modified_base 5: mod_base = OTHER; note = Uracil
  modified_base 7: mod_base = OTHER; note = Uracil
  modified_base 11: mod_base = OTHER; note = Uracil
  misc_feature join(1,3,5,7,9,11,13,15,17,19): note = RNA residue
  misc_feature join(2,4,6,8,10,12,14,16,18,20): note = DNA residue
aaattgtacctgaactgaag

SEQ ID NO: 741 - DNA, 20 bp, synthetic construct
  misc_feature 1..20: note = Description of Artificial Sequence: Synthetic oligonucleotide
  misc_feature 1..20: note = Description of Combined DNA/RNA Molecule: Synthetic oligonucleotide
  source 1..20: mol_type = other DNA
  modified_base 5: mod_base = OTHER; note = Uracil
  modified_base 17: mod_base = OTHER; note = Uracil
  misc_feature join(1,3,5,7,9,11,13,15,17,19): note = RNA residue
  misc_feature join(2,4,6,8,10,12,14,16,18,20): note = DNA residue
caaattgtacctgaactgaa

SEQ ID NO: 742 - DNA, 20 bp, synthetic construct
  misc_feature 1..20: note = Description of Artificial Sequence: Synthetic oligonucleotide
  misc_feature 1..20: note = Description of Combined DNA/RNA Molecule: Synthetic oligonucleotide
  source 1..20: mol_type = other DNA
  modified_base 7: mod_base = OTHER; note = Uracil
  modified_base 9: mod_base = OTHER; note = Uracil
  modified_base 13: mod_base = OTHER; note = Uracil
  misc_feature join(1,3,5,7,9,11,13,15,17,19): note = RNA residue
  misc_feature join(2,4,6,8,10,12,14,16,18,20): note = DNA residue
gcaaattgtacctgaactga

SEQ ID NO: 743 - DNA, 20 bp, synthetic construct
  misc_feature 1..20: note = Description of Artificial Sequence: Synthetic oligonucleotide
  misc_feature 1..20: note = Description of Combined DNA/RNA Molecule: Synthetic oligonucleotide
  source 1..20: mol_type = other DNA
  modified_base 7: mod_base = OTHER; note = Uracil
  modified_base 19: mod_base = OTHER; note = Uracil
  misc_feature join(1,3,5,7,9,11,13,15,17,19): note = RNA residue
  misc_feature join(2,4,6,8,10,12,14,16,18,20): note = DNA residue
cgcaaattgtacctgaactg

SEQ ID NO: 744 - DNA, 20 bp, synthetic construct
  misc_feature 1..20: note = Description of Artificial Sequence: Synthetic oligonucleotide
  misc_feature 1..20: note = Description of Combined DNA/RNA Molecule: Synthetic oligonucleotide
  source 1..20: mol_type = other DNA
  modified_base 9: mod_base = OTHER; note = Uracil
  modified_base 11: mod_base = OTHER; note = Uracil
  modified_base 15: mod_base = OTHER; note = Uracil
  misc_feature join(1,3,5,7,9,11,13,15,17,19): note = RNA residue
  misc_feature join(2,4,6,8,10,12,14,16,18,20): note = DNA residue
gcgcaaattgtacctgaact

SEQ ID NO: 745 - DNA, 20 bp, synthetic construct
  misc_feature 1..20: note = Description of Artificial Sequence: Synthetic oligonucleotide
  misc_feature 1..20: note = Description of Combined DNA/RNA Molecule: Synthetic oligonucleotide
  source 1..20: mol_type = other DNA
  modified_base 9: mod_base = OTHER; note = Uracil
  modified_base 13: mod_base = OTHER; note = Uracil
  misc_feature join(1,3,5,7,9,11,13,15,17,19): note = RNA residue
  misc_feature join(2,4,6,8,10,12,14,16,18,20): note = DNA residue
ataaatgctgacttagaaag

SEQ ID NO: 746 - DNA, 20 bp, synthetic construct
  misc_feature 1..20: note = Description of Artificial Sequence: Synthetic oligonucleotide
  misc_feature 1..20: note = Description of Combined DNA/RNA Molecule: Synthetic oligonucleotide
  source 1..20: mol_type = other DNA
  modified_base 11: mod_base = OTHER; note = Uracil
  modified_base 15: mod_base = OTHER; note = Uracil
  misc_feature join(1,3,5,7,9,11,13,15,17,19): note = RNA residue
  misc_feature join(2,4,6,8,10,12,14,16,18,20): note = DNA residue
aaataaatgctgacttagaa

SEQ ID NO: 747 - DNA, 20 bp, synthetic construct
  misc_feature 1..20: note = Description of Artificial Sequence: Synthetic oligonucleotide
  misc_feature 1..20: note = Description of Combined DNA/RNA Molecule: Synthetic oligonucleotide
  source 1..20: mol_type = other DNA
  modified_base 5: mod_base = OTHER; note = Uracil
  modified_base 9: mod_base = OTHER; note = Uracil
  modified_base 17: mod_base = OTHER; note = Uracil
  misc_feature join(1,3,5,7,9,11,13,15,17,19): note = RNA residue
  misc_feature join(2,4,6,8,10,12,14,16,18,20): note = DNA residue
aaaataaatgctgacttaga

SEQ ID NO: 748 - DNA, 20 bp, synthetic construct
  misc_feature 1..20: note = Description of Artificial Sequence: Synthetic oligonucleotide
  source 1..20: mol_type = other DNA
  misc_feature join(1,3,5,7,9,11,13,15,17,19): note = RNA residue
  misc_feature join(2,4,6,8,10,12,14,16,18,20): note = DNA residue
gtgggtaaacagccacaaaa

SEQ ID NO: 749 - DNA, 20 bp, synthetic construct
  misc_feature 1..20: note = Description of Artificial Sequence: Synthetic oligonucleotide
  misc_feature 1..20: note = Description of Combined DNA/RNA Molecule: Synthetic oligonucleotide
  source 1..20: mol_type = other DNA
  modified_base 1: mod_base = OTHER; note = Uracil
  modified_base 3: mod_base = OTHER; note = Uracil
  modified_base 7: mod_base = OTHER; note = Uracil
  misc_feature join(1,3,5,7,9,11,13,15,17,19): note = RNA residue
  misc_feature join(2,4,6,8,10,12,14,16,18,20): note = DNA residue
tgtgggtaaacagccacaaa

SEQ ID NO: 750 - DNA, 20 bp, synthetic construct
  misc_feature 1..20: note = Description of Artificial Sequence: Synthetic oligonucleotide
  misc_feature 1..20: note = Description of Combined DNA/RNA Molecule: Synthetic oligonucleotide
  source 1..20: mol_type = other DNA
  modified_base 3: mod_base = OTHER; note = Uracil
  modified_base 5: mod_base = OTHER; note = Uracil
  modified_base 9: mod_base = OTHER; note = Uracil
  misc_feature join(1,3,5,7,9,11,13,15,17,19): note = RNA residue
  misc_feature join(2,4,6,8,10,12,14,16,18,20): note = DNA residue
attgtgggtaaacagccaca

SEQ ID NO: 751 - DNA, 20 bp, synthetic construct
  misc_feature 1..20: note = Description of Artificial Sequence: Synthetic oligonucleotide
  misc_feature 1..20: note = Description of Combined DNA/RNA Molecule: Synthetic oligonucleotide
  source 1..20: mol_type = other DNA
  modified_base 3: mod_base = OTHER; note = Uracil
  misc_feature join(1,3,5,7,9,11,13,15,17,19): note = RNA residue
  misc_feature join(2,4,6,8,10,12,14,16,18,20): note = DNA residue
cattgtgggtaaacagccac

SEQ ID NO: 752 - DNA, 20 bp, synthetic construct
  misc_feature 1..20: note = Description of Artificial Sequence: Synthetic oligonucleotide
  misc_feature 1..20: note = Description of Combined DNA/RNA Molecule: Synthetic oligonucleotide
  source 1..20: mol_type = other DNA
  modified_base 1: mod_base = OTHER; note = Uracil
  modified_base 5: mod_base = OTHER; note = Uracil
  modified_base 7: mod_base = OTHER; note = Uracil
  modified_base 11: mod_base = OTHER; note = Uracil
  misc_feature join(1,3,5,7,9,11,13,15,17,19): note = RNA residue
  misc_feature join(2,4,6,8,10,12,14,16,18,20): note = DNA residue
tcattgtgggtaaacagcca

SEQ ID NO: 753 - DNA, 20 bp, synthetic construct
  misc_feature 1..20: note = Description of Artificial Sequence: Synthetic oligonucleotide
  misc_feature 1..20: note = Description of Combined DNA/RNA Molecule: Synthetic oligonucleotide
  source 1..20: mol_type = other DNA
  modified_base 1: mod_base = OTHER; note = Uracil
  modified_base 5: mod_base = OTHER; note = Uracil
  misc_feature join(1,3,5,7,9,11,13,15,17,19): note = RNA residue
  misc_feature join(2,4,6,8,10,12,14,16,18,20): note = DNA residue
ttcattgtgggtaaacagcc

SEQ ID NO: 754 - DNA, 20 bp, synthetic construct
  misc_feature 1..20: note = Description of Artificial Sequence: Synthetic oligonucleotide
  misc_feature 1..20: note = Description of Combined DNA/RNA Molecule: Synthetic oligonucleotide
  source 1..20: mol_type = other DNA
  modified_base 1: mod_base = OTHER; note = Uracil
  modified_base 3: mod_base = OTHER; note = Uracil
  modified_base 7: mod_base = OTHER; note = Uracil
  modified_base 9: mod_base = OTHER; note = Uracil
  modified_base 13: mod_base = OTHER; note = Uracil
  misc_feature join(1,3,5,7,9,11,13,15,17,19): note = RNA residue
  misc_feature join(2,4,6,8,10,12,14,16,18,20): note = DNA residue
tttcattgtgggtaaacagc

SEQ ID NO: 755 - DNA, 20 bp, synthetic construct
  misc_feature 1..20: note = Description of Artificial Sequence: Synthetic oligonucleotide
  misc_feature 1..20: note = Description of Combined DNA/RNA Molecule: Synthetic oligonucleotide
  source 1..20: mol_type = other DNA
  modified_base 3: mod_base = OTHER; note = Uracil
  modified_base 7: mod_base = OTHER; note = Uracil
  misc_feature join(1,3,5,7,9,11,13,15,17,19): note = RNA residue
  misc_feature join(2,4,6,8,10,12,14,16,18,20): note = DNA residue
ctttcattgtgggtaaacag

SEQ ID NO: 756 - DNA, 20 bp, synthetic construct
  misc_feature 1..20: note = Description of Artificial Sequence: Synthetic oligonucleotide
  misc_feature 1..20: note = Description of Combined DNA/RNA Molecule: Synthetic oligonucleotide
  source 1..20: mol_type = other DNA
  modified_base 1: mod_base = OTHER; note = Uracil
  modified_base 3: mod_base = OTHER; note = Uracil
  modified_base 5: mod_base = OTHER; note = Uracil
  modified_base 9: mod_base = OTHER; note = Uracil
  modified_base 11: mod_base = OTHER; note = Uracil
  modified_base 15: mod_base = OTHER; note = Uracil
  misc_feature join(1,3,5,7,9,11,13,15,17,19): note = RNA residue
  misc_feature join(2,4,6,8,10,12,14,16,18,20): note = DNA residue
tctttcattgtgggtaaaca

SEQ ID NO: 757 - DNA, 20 bp, synthetic construct
  misc_feature 1..20: note = Description of Artificial Sequence: Synthetic oligonucleotide
  misc_feature 1..20: note = Description of Combined DNA/RNA Molecule: Synthetic oligonucleotide
  source 1..20: mol_type = other DNA
  modified_base 5: mod_base = OTHER; note = Uracil
  modified_base 9: mod_base = OTHER; note = Uracil
  misc_feature join(1,3,5,7,9,11,13,15,17,19): note = RNA residue
  misc_feature join(2,4,6,8,10,12,14,16,18,20): note = DNA residue
ctctttcattgtgggtaaac

SEQ ID NO: 758 - DNA, 20 bp, synthetic construct
  misc_feature 1..20: note = Description of Artificial Sequence: Synthetic oligonucleotide
  misc_feature 1..20: note = Description of Combined DNA/RNA Molecule: Synthetic oligonucleotide
  source 1..20: mol_type = other DNA
  modified_base 3: mod_base = OTHER; note = Uracil
  modified_base 5: mod_base = OTHER; note = Uracil
  modified_base 7: mod_base = OTHER; note = Uracil
  modified_base 11: mod_base = OTHER; note = Uracil
  modified_base 13: mod_base = OTHER; note = Uracil
  modified_base 17: mod_base = OTHER; note = Uracil
  misc_feature join(1,3,5,7,9,11,13,15,17,19): note = RNA residue
  misc_feature join(2,4,6,8,10,12,14,16,18,20): note = DNA residue
actctttcattgtgggtaaa

SEQ ID NO: 759 - DNA, 20 bp, synthetic construct
  misc_feature 1..20: note = Description of Artificial Sequence: Synthetic oligonucleotide
  misc_feature 1..20: note = Description of Combined DNA/RNA Molecule: Synthetic oligonucleotide
  source 1..20: mol_type = other DNA
  modified_base 7: mod_base = OTHER; note = Uracil
  modified_base 11: mod_base = OTHER; note = Uracil
  misc_feature join(1,3,5,7,9,11,13,15,17,19): note = RNA residue
  misc_feature join(2,4,6,8,10,12,14,16,18,20): note = DNA residue
aactctttcattgtgggtaa

SEQ ID NO: 760 - DNA, 20 bp, synthetic construct
  misc_feature 1..20: note = Description of Artificial Sequence: Synthetic oligonucleotide
  misc_feature 1..20: note = Description of Combined DNA/RNA Molecule: Synthetic oligonucleotide
  source 1..20: mol_type = other DNA
  modified_base 5: mod_base = OTHER; note = Uracil
  modified_base 7: mod_base = OTHER; note = Uracil
  modified_base 9: mod_base = OTHER; note = Uracil
  modified_base 13: mod_base = OTHER; note = Uracil
  modified_base 15: mod_base = OTHER; note = Uracil
  modified_base 19: mod_base = OTHER; note = Uracil
  misc_feature join(1,3,5,7,9,11,13,15,17,19): note = RNA residue
  misc_feature join(2,4,6,8,10,12,14,16,18,20): note = DNA residue
gaactctttcattgtgggta

SEQ ID NO: 761 - DNA, 20 bp, synthetic construct
  misc_feature 1..20: note = Description of Artificial Sequence: Synthetic oligonucleotide
  misc_feature 1..20: note = Description of Combined DNA/RNA Molecule: Synthetic oligonucleotide
  source 1..20: mol_type = other DNA
  modified_base 9: mod_base = OTHER; note = Uracil
  modified_base 13: mod_base = OTHER; note = Uracil
  misc_feature join(1,3,5,7,9,11,13,15,17,19): note = RNA residue
  misc_feature join(2,4,6,8,10,12,14,16,18,20): note = DNA residue
agaactctttcattgtgggt

SEQ ID NO: 762 - DNA, 20 bp, synthetic construct
  misc_feature 1..20: note = Description of Artificial Sequence: Synthetic oligonucleotide
  misc_feature 1..20: note = Description of Combined DNA/RNA Molecule: Synthetic oligonucleotide
  source 1..20: mol_type = other DNA
  modified_base 1: mod_base = OTHER; note = Uracil
  modified_base 7: mod_base = OTHER; note = Uracil
  modified_base 9: mod_base = OTHER; note = Uracil
  modified_base 11: mod_base = OTHER; note = Uracil
  modified_base 15: mod_base = OTHER; note = Uracil
  modified_base 17: mod_base = OTHER; note = Uracil
  misc_feature join(1,3,5,7,9,11,13,15,17,19): note = RNA residue
  misc_feature join(2,4,6,8,10,12,14,16,18,20): note = DNA residue
tagaactctttcattgtggg

SEQ ID NO: 763 - DNA, 20 bp, synthetic construct
  misc_feature 1..20: note = Description of Artificial Sequence: Synthetic oligonucleotide
  misc_feature 1..20: note = Description of Combined DNA/RNA Molecule: Synthetic oligonucleotide
  source 1..20: mol_type = other DNA
  modified_base 1: mod_base = OTHER; note = Uracil
  modified_base 11: mod_base = OTHER; note = Uracil
  modified_base 15: mod_base = OTHER; note = Uracil
  misc_feature join(1,3,5,7,9,11,13,15,17,19): note = RNA residue
  misc_feature join(2,4,6,8,10,12,14,16,18,20): note = DNA residue
ttagaactctttcattgtgg

SEQ ID NO: 764 - DNA, 20 bp, synthetic construct
  misc_feature 1..20: note = Description of Artificial Sequence: Synthetic oligonucleotide
  misc_feature 1..20: note = Description of Combined DNA/RNA Molecule: Synthetic oligonucleotide
  source 1..20: mol_type = other DNA
  modified_base 3: mod_base = OTHER; note = Uracil
  modified_base 8: mod_base = OTHER; note = Uracil
  modified_base 13: mod_base = OTHER; note = Uracil
  modified_base 15: mod_base = OTHER; note = Uracil
  modified_base 17: mod_base = OTHER; note = Uracil
  misc_feature join(1,3,5,7,9,11,13,15,17,19): note = RNA residue
  misc_feature join(2,4,6,8,10,12,14,16,18,20): note = DNA residue
ctttattagaactctttcat

SEQ ID NO: 765 - DNA, 20 bp, synthetic construct
  misc_feature 1..20: note = Description of Artificial Sequence: Synthetic oligonucleotide
  misc_feature 1..20: note = Description of Combined DNA/RNA Molecule: Synthetic oligonucleotide
  source 1..20: mol_type = other DNA
  modified_base 7: mod_base = OTHER; note = Uracil
  modified_base 11: mod_base = OTHER; note = uracil
  modified_base 17: mod_base = OTHER; note = Uracil
  modified_base 19: mod_base = OTHER; note = Uracil
  misc_feature join(1,3,5,7,9,11,13,15,17,19): note = RNA residue
  misc_feature join(2,4,6,8,10,12,14,16,18,20): note = DNA residue
acatctttattagaactctt

SEQ ID NO: 766 - DNA, 20 bp, synthetic construct
  misc_feature 1..20: note = Description of Artificial Sequence: Synthetic oligonucleotide
  misc_feature 1..20: note = Description of Combined DNA/RNA Molecule: Synthetic oligonucleotide
  source 1..20: mol_type = other DNA
  modified_base 9: mod_base = OTHER; note = Uracil
  modified_base 13: mod_base = OTHER; note = Uracil
  modified_base 19: mod_base = OTHER; note = Uracil
  misc_feature join(1,3,5,7,9,11,13,15,17,19): note = RNA residue
  misc_feature join(2,4,6,8,10,12,14,16,18,20): note = DNA residue
gcacatctttattagaactc

SEQ ID NO: 767 - DNA, 20 bp, synthetic construct
  misc_feature 1..20: note = Description of Artificial Sequence: Synthetic oligonucleotide
  misc_feature 1..20: note = Description of Combined DNA/RNA Molecule: Synthetic oligonucleotide
  source 1..20: mol_type = other DNA
  modified_base 11: mod_base = OTHER; note = Uracil
  modified_base 15: mod_base = OTHER; note = Uracil
  misc_feature join(1,3,5,7,9,11,13,15,17,19): note = RNA residue
  misc_feature join(2,4,6,8,10,12,14,16,18,20): note = DNA residue
cagcacatctttattagaac

SEQ ID NO: 768 - DNA, 20 bp, synthetic construct
  misc_feature 1..20: note = Description of Artificial Sequence: Synthetic oligonucleotide
  misc_feature 1..20: note = Description of Combined DNA/RNA Molecule: Synthetic oligonucleotide
  source 1..20: mol_type = other DNA
  modified_base 1: mod_base = OTHER; note = Uracil
  modified_base 9: mod_base = OTHER; note = Uracil
  modified_base 11: mod_base = OTHER; note = Uracil
  modified_base 13: mod_base = OTHER; note = Uracil
  modified_base 16: mod_base = OTHER; note = Uracil
  misc_feature join(1,3,5,7,9,11,13,15,17,19): note = RNA residue
  misc_feature join(2,4,6,8,10,12,14,16,18,20): note = DNA residue
tcagcacatctttattagaa

SEQ ID NO: 769 - DNA, 15 bp, synthetic construct
  misc_feature 1..15: note = Description of Artificial Sequence: Synthetic probe
  source 1..15: mol_type = other DNA
ggccagcttggcccg

SEQ ID NO: 770 - DNA, 16 bp, synthetic construct
  misc_feature 1..16: note = Description of Artificial Sequence: Synthetic probe
  source 1..16: mol_type = other DNA
gcgcaccgcgcttgaa

SEQ ID NO: 771 - DNA, 17 bp, synthetic construct
  misc_feature 1..17: note = Description of Artificial Sequence: Synthetic probe
  source 1..17: mol_type = other DNA
gccggtggaggtgaggc

SEQ ID NO: 772 - DNA, 19 bp, synthetic construct
  misc_feature 1..19: note = Description of Artificial Sequence: Synthetic probe
  source 1..19: mol_type = other DNA
cgcggtccatgaaggtgag

SEQ ID NO: 773 - DNA, 18 bp, synthetic construct
  misc_feature 1..18: note = Description of Artificial Sequence: Synthetic probe
  source 1..18: mol_type = other DNA
gccagtagagggagccgg

SEQ ID NO: 774 - DNA, 19 bp, synthetic construct
  misc_feature 1..19: note = Description of Artificial Sequence: Synthetic probe
  source 1..19: mol_type = other DNA
gacaggaagggcgacatgg

SEQ ID NO: 775 - DNA, 16 bp, synthetic construct
  misc_feature 1..16: note = Description of Artificial Sequence: Synthetic probe
  source 1..16: mol_type = other DNA
gcgggggtggtgcagg

SEQ ID NO: 776 - DNA, 22 bp, synthetic construct
  misc_feature 1..22: note = Description of Artificial Sequence: Synthetic probe
  source 1..22: mol_type = other DNA
tgtaactcaaagtgctgctggc

SEQ ID NO: 777 - DNA, 16 bp, synthetic construct
  misc_feature 1..16: note = Description of Artificial Sequence: Synthetic probe
  source 1..16: mol_type = other DNA
gccgacgtggtgccgt

SEQ ID NO: 778 - DNA, 18 bp, synthetic construct
  misc_feature 1..18: note = Description of Artificial Sequence: Synthetic probe
  source 1..18: mol_type = other DNA
atggggtggctggggtag

SEQ ID NO: 779 - DNA, 20 bp, synthetic construct
  misc_feature 1..20: note = Description of Artificial Sequence: Synthetic probe
  source 1..20: mol_type = other DNA
tcaacacggagctgtagggc

SEQ ID NO: 780 - DNA, 20 bp, synthetic construct
  misc_feature 1..20: note = Description of Artificial Sequence: Synthetic probe
  source 1..20: mol_type = other DNA
gttgcccagcgagttctgag

SEQ ID NO: 781 - DNA, 20 bp, synthetic construct
  misc_feature 1..20: note = Description of Artificial Sequence: Synthetic probe
  source 1..20: mol_type = other DNA
gcggtggagaaggagtggtt

SEQ ID NO: 782 - DNA, 17 bp, synthetic construct
  misc_feature 1..17: note = Description of Artificial Sequence: Synthetic probe
  source 1..17: mol_type = other DNA
ccacgctcaggccgttg

SEQ ID NO: 783 - DNA, 17 bp, synthetic construct
  misc_feature 1..17: note = Description of Artificial Sequence: Synthetic probe
  source 1..17: mol_type = other DNA
cccgttgaccagccggt

SEQ ID NO: 784 - DNA, 18 bp, synthetic construct
  misc_feature 1..18: note = Description of Artificial Sequence: Synthetic probe
  source 1..18: mol_type = other DNA
cgtggcgtacgggatctc

SEQ ID NO: 785 - DNA, 17 bp, synthetic construct
  misc_feature 1..17: note = Description of Artificial Sequence: Synthetic probe
  source 1..17: mol_type = other DNA
gcggccgtgaggtggtg

SEQ ID NO: 786 - DNA, 15 bp, synthetic construct
  misc_feature 1..15: note = Description of Artificial Sequence: Synthetic probe
  source 1..15: mol_type = other DNA
gaggcggctagcgcg

SEQ ID NO: 787 - DNA, 16 bp, synthetic construct
  misc_feature 1..16: note = Description of Artificial Sequence: Synthetic probe
  source 1..16: mol_type = other DNA
caggccgcagggcacc

SEQ ID NO: 788 - DNA, 17 bp, synthetic construct
  misc_feature 1..17: note = Description of Artificial Sequence: Synthetic probe
  source 1..17: mol_type = other DNA
ccagagcagggcaccga

SEQ ID NO: 789 - DNA, 21 bp, synthetic construct
  misc_feature 1..21: note = Description of Artificial Sequence: Synthetic probe
  source 1..21: mol_type = other DNA
caggggttgagggagtaggtc

SEQ ID NO: 790 - DNA, 18 bp, synthetic construct
  misc_feature 1..18: note = Description of Artificial Sequence: Synthetic probe
  source 1..18: mol_type = other DNA
gcgagcaggttgacggag

SEQ ID NO: 791 - DNA, 22 bp, synthetic construct
  misc_feature 1..22: note = Description of Artificial Sequence: Synthetic probe
  source 1..22: mol_type = other DNA
gaaaaagtaactggtctggccc

SEQ ID NO: 792 - DNA, 16 bp, synthetic construct
  misc_feature 1..16: note = Description of Artificial Sequence: Synthetic probe
  source 1..16: mol_type = other DNA
ggtgcgggacgtgggg

SEQ ID NO: 793 - DNA, 21 bp, synthetic construct
  misc_feature 1..21: note = Description of Artificial Sequence: Synthetic probe
  source 1..21: mol_type = other DNA
tgctctgcgaagtcattgacg

SEQ ID NO: 794 - DNA, 17 bp, synthetic construct
  misc_feature 1..17: note = Description of Artificial Sequence: Synthetic probe
  source 1..17: mol_type = other DNA
ggcgctcatggacgtgc

SEQ ID NO: 795 - DNA, 16 bp, synthetic construct
  misc_feature 1..16: note = Description of Artificial Sequence: Synthetic probe
  source 1..16: mol_type = other DNA
aggaggacgcggccct

SEQ ID NO: 796 - DNA, 20 bp, synthetic construct
  misc_feature 1..20: note = Description of Artificial Sequence: Synthetic probe
  source 1..20: mol_type = other DNA
gaatttgccatgggtggaat

SEQ ID NO: 797 - DNA, 20 bp, synthetic construct
  misc_feature 1..20: note = Description of Artificial Sequence: Synthetic probe
  source 1..20: mol_type = other DNA
ggagggatctcgctcctgga

SEQ ID NO: 798 - DNA, 19 bp, synthetic construct
  misc_feature 1..19: note = Description of Artificial Sequence: Synthetic probe
  source 1..19: mol_type = other DNA
ccccagccttctccatggt

SEQ ID NO: 799 - DNA, 19 bp, synthetic construct
  misc_feature 1..19: note = Description of Artificial Sequence: Synthetic probe
  source 1..19: mol_type = other DNA
gctcccccctgcaaatgag

SEQ ID NO: 800 - DNA, 18 bp, synthetic construct
  misc_feature 1..18: note = Description of Artificial Sequence: Synthetic probe
  source 1..18: mol_type = other DNA
agccttgacggtgccatg

SEQ ID NO: 801 - DNA, 21 bp, synthetic construct
  misc_feature 1..21: note = Description of Artificial Sequence: Synthetic probe
  source 1..21: mol_type = other DNA
gatgacaagcttcccgttctc

SEQ ID NO: 802 - DNA, 22 bp, synthetic construct
  misc_feature 1..22: note = Description of Artificial Sequence: Synthetic probe
  source 1..22: mol_type = other DNA
agatggtgatgggatttccatt

SEQ ID NO: 803 - DNA, 20 bp, synthetic construct
  misc_feature 1..20: note = Description of Artificial Sequence: Synthetic probe
  source 1..20: mol_type = other DNA
gcatcgccccacttgatttt

SEQ ID NO: 804 - DNA, 19 bp, synthetic construct
  misc_feature 1..19: note = Description of Artificial Sequence: Synthetic probe
  source 1..19: mol_type = other DNA
cacgacgtactcagcgcca

SEQ ID NO: 805 - DNA, 22 bp, synthetic construct
  misc_feature 1..22: note = Description of Artificial Sequence: Synthetic probe
  source 1..22: mol_type = other DNA
ggcagagatgatgacccttttg

SEQ ID NO: 806 - DNA, 21 bp, synthetic construct
  misc_feature 1..21: note = Description of Artificial Sequence: Synthetic probe
  source 1..21: mol_type = other DNA
ggtgaagacgccagtggactc

1-82. (canceled)

83. An antisense oligonucleotide comprising an antisense oligonucleotide sequence that hybridizes to a target nucleic acid sequence located within positions 2000-2100 or 2900-3000 of a FOXG1 nucleic acid.

84. The antisense oligonucleotide of claim 83, wherein the antisense oligonucleotide sequence comprises SEQ ID NO: 100, SEQ ID NO:103, SEQ ID NO: 284, SEQ ID NO: 286, SEQ ID NO: 287, SEQ ID NO: 288, or SEQ ID NO: 289.

85. The antisense oligonucleotide of claim 83, wherein the antisense oligonucleotide hybridizes to one or more nucleotides within or adjacent to a position on the FOXG1 nucleic acid targeted by SEQ ID NO: 100, SEQ ID NO:103, SEQ ID NO: 284, SEQ ID NO: 286, SEQ ID NO: 287, SEQ ID NO: 288, or SEQ ID NO: 289.

86. The antisense oligonucleotide of claim 83, wherein the antisense oligonucleotide sequence comprises 90% sequence identity or greater to SEQ ID NO: 100, SEQ ID NO: 103, SEQ ID NO: 284, SEQ ID NO: 286, SEQ ID NO: 287, SEQ ID NO: 288, or SEQ ID NO: 289.

87. The antisense oligonucleotide of claim 83, wherein the antisense oligonucleotide sequence comprises 10 or more contiguous nucleotides selected from a sequence within SEQ ID NO: 100, SEQ ID NO: 103, SEQ ID NO: 284, SEQ ID NO: 286, SEQ ID NO: 287, SEQ ID NO: 288, or SEQ ID NO: 289.

88. The antisense oligonucleotide of claim 83, wherein antisense oligonucleotide comprises a modification.

89. The antisense oligonucleotide of claim 88, wherein the modification comprises a modified inter-nucleoside linkage, a modified nucleoside, or a combination thereof.

90. The antisense oligonucleotide of claim 89, wherein the modified inter-nucleoside linkage is a phosphorothioate inter-nucleoside linkage and/or a phosphodiester inter-nucleoside linkage.

91. The antisense oligonucleotide of claim 89, wherein the modified nucleoside comprises a modified sugar, optionally wherein the modified sugar is a bicyclic sugar.

92. The antisense oligonucleotide of claim 91, wherein the modified sugar comprises a 2′-O-methoxyethyl group.

93. The antisense oligonucleotide of claim 83, wherein the FOXG1 nucleic acid comprises a 5′ untranslated region (5′ UTR) and a 3′ untranslated region (3′ UTR), and wherein the target sequence is located at the 5′ UTR or the 3′ UTR of the FOXG1 nucleic acid.

94. The antisense oligonucleotide of claim 83, wherein the FOXG1 nucleic acid molecule is a ribonucleic acid (RNA).

95. A pharmaceutical composition comprising the antisense oligonucleotide of claim 83 and a pharmaceutically acceptable carrier or diluent.

96. A method of modulating expression of a FOXG1 in a cell, comprising contacting the cell with a composition comprising an antisense oligonucleotide sequence that hybridizes to a target nucleic acid sequence located within positions 2000-2100 or 2900-3000 of a FOXG1 nucleic acid.

97. The method of claim 96, wherein the cell is a located in a brain of an individual.

98. The method of claim 96, wherein the individual is a human.

99. The method of claim 97, wherein the individual comprises a mutated FOXG1 gene.

100. The method of claim 97, wherein the individual has a FOXG1 disease or disorder.

101. The method of claim 100, wherein the FOXG1 disease or disorder is FOXG1 syndrome.

102. A method of treating or ameliorating a FOXG1 disease or disorder in an individual having, or at risk of having, the FOXG1 disease or disorder, comprising administering to the individual an antisense oligonucleotide, wherein the antisense oligonucleotide comprises a sequence that hybridizes to a target nucleic acid sequence located within positions 2000-2100 or 2900-3000 of a FOXG1 nucleic acid, thereby treating or ameliorating a FOXG1 disease in the individual.
